(19) United States
(12) Patent Application Publication
(10) Pub. No.: US 2005/0277123 A1
(43) Pub. Date: Dec. 15, 2005

(54) Variants of NEDD4L associated with hypertension and viral budding

(76) Inventors: Robert B. Weiss, Salt Lake City, UT (US); Jean-Marc Lalouel, Salt Lake City, UT (US); James Pankow, Eagan, MN (US); Diane M. Dunn, Salt Lake City, UT (US)

Correspondence Address: TRASK BRITT, P.O. BOX 2550, SALT LAKE CITY, UT, 84110, US

(21) Appl. No.: 10/928,446

(22) Filed: Aug. 26, 2004

Related U.S. Application Data
(63) Continuation of application No. PCT/US03/06869, filed on Feb. 26, 2003.
(60) Provisional application No. 60/359,741, filed on Feb. 26, 2002.

(51) Int. Cl. C12Q 1/68; C07H 21/04; C12P 21/06; C07K 14/705

(52) U.S. Cl. 435/6; 530/350; 435/69.1; 435/320.1; 435/325; 536/23.5

(57) ABSTRACT

Disclosed are compositions and methods related to NEDD4L, a ubiquitin ligase, and hypertension as well as viral budding. A systematic search for genetic polymorphism was conducted by resequencing exon and intron boundaries in human genomic DNA. Isoforms encoding a Ca²⁺-dependent lipid binding C2 domain at the N-terminus of NEDD4L were identified. Additional isoforms lacing the Ca²⁺-dependent lipid binding C2 domain were also identified. A common polymorphism was identified, Variant 13, with either G (70%) or A (30%) as the last nucleotide of exon 1, which effects splice site finction and formation of the Ca²⁺-dependent lipid binding C2 domain. Identified isoforms are present in both kidney and adrenal samples.

### CROSS REFERENCE TO RELATED APPLICATIONS

[0001] This application is a continuation of International Application Number PCT/US03/06869, filed Feb. 26, 2003, published in English Nov. 13, 2003, as International Publication Number WO 03/093452 A2, which claims the benefit under 35 U.S.C. § 119(e) of U.S. Provisional Application No. 06/359,741, filed Feb. 6,2002, the contents of both of which are incorporated by reference.

### GOVERNMENT LICENSE RIGHTS

[0002] The research supporting this invention was partially funded by National Institute of Health, grant number NIH/NHLBI 5U01-HL5449607. The United States Government may have some right in this invention.

### INCORPORATION-BY-REFERENCE OF MATERIAL SUBMITTED ON A COMPACT DISC

[0003] The Sequence Listing is provided on compact disc, under 37 C.F.R. §§ 1.821(c) and 1.823(a)(2), rather than on paper.

[0004] Pursuant to 37 C.F.R. § 1.52(e)(5), the Sequence Listing has been submitted via CD-R, and is hereby incorporated by reference in its entirety. The CD-R is labeled and contains only one 16 Mb file (274576PC.APP) recorded on Feb. 26, 2003.

### TECHNICAL FIELD

[0005] The invention relates generally to biotechnology, and more specifically to genetic traits associated with variants of NEDD4L which effect hypertension and viral budding.

### BACKGROUND

[0006] Genetic determinants of essential hypertension have proven elusive, as no single common variant is likely to exert a major effect on blood pressure (Corvol et al. 1999; Luft 2000). In rare Mendelian syndromes of hypertension, by contrast, gain or loss of function mutations account for the physiology and the molecular basis of disorders. Such remarkable advances have pinpointed critical elements of regulatory pathways involved in sodium homeostasis and blood pressure control (Lifton et al. 2001). Thus in Liddle's syndrome (Liddle et al. 1963), mutations affecting PY domains of the epithelial sodium channel (ENaC) lead to increased sodium reabsorption as a result of increased ENaC activity (Shimkets et al. 1994; Schild et al. 1995). ENaC mediates sodium reabsorption in the cortical collecting tubules of the kidney, accounting for the fine regulation of sodium balance. The cell surface expression of ENaC is regulated by hormones such as aldosterone and vasopressin and by intracellular signaling, including ubiquitination and phosphorylation (Debonneville et al. 2001; Snyder et al. 2002)

### SUMMARY OF THE INVENTION

[0007] Disclosed herein are common genetic traits associated with variants of a protein called NEDD4L which effect hypertension through, for example, Na transport through the ENaC, and viral budding.

[0008] Described is an isolated nucleic acid having a sequence useful in the diagnosis of hypertension or enveloped viral infection. Particularly, the use of one or more variants selected from Table 3 or FIG. 5.

[0009] In one embodiment, the invention relates to an isolated nucleic acid comprising a nucleic acid encoding a NEDD4L gene product having a Ca²+-dependent lipid binding (C2) domain or a fragment thereof.

[0010] Another embodiment of the invention relates to a vector or an expression vector having a nucleic acid of the invention.

[0011] Another embodiment of the invention relates to a host cell having an isolated nucleic acid of the invention. The host cell may be E. Coli, Bacillus sp., Streptomyces sp., yeast, fungi, insect cells, plant cells, mammalian cells, or the like.

[0012] Another embodiment of the invention relates to NEDD4L polypeptides having a having a Ca²⁺-dependent lipid binding (C2) domain or a fragment thereof.

[0013] Another embodiment of the invention relates to an antibody capable of recognizing a fragment or epitope derived from NEDD4L and/or the Ca²⁺-dependent lipid binding C2 domain of NEDD4L.

[0014] Another embodiment of the invention relates to a composition for identifying sequence information about a NEDD4L gene. This embodiment encompasses primers capable of providing sequence information, particularly, about position variant 13 and probes, for example, DNA and RNA probes capable of providing sequence information about NEDD4L.

[0015] Another embodiment of the invention relates to a composition for identifying sequence information about a NEDD4L gene, wherein the primer provides direct sequence information about variant 13.

[0016] Another embodiment of the invention relates to a composition for identifying sequence information about a NEDD4L gene, wherein the primer provides sequence information about one or more variants listed in Table 3 and/or a microsatellite polymorphism, for example, a GT microsatellite.

[0017] Another embodiment of the invention relates to identifying sequence information about a NEDD4L gene using genetic linkage to a single nucleotide polymorphism, a restriction fragment polymorphism, a dinucleotide polymorphism, a trinucleotide polymorphism, a deletion or an insertion.

[0018] Another embodiment of the invention relates to a method for diagnosing, prognosing and/or treating hypertension or viral infection. Hypertension is linked to NEDD4L and the invention discloses methods for treating hypertension based on information regarding NEDD4L.

[0019] Additional advantages of the invention will be set forth in part in the description, which follows, and in part will be obvious from the description, or may be learned by practice of the invention. The advantages of the invention will be realized and attained by means of the elements and combinations particularly pointed out in the appended claims. It is to be understood that both the foregoing general description and the following detailed description are exemplary and explanatory only and are not restrictive of the invention, as claimed.

### BRIEF DESCRIPTION OF THE SEVERAL VIEWS OF THE DRAWINGS

[0020] The accompanying drawings, which are incorporated in and constitute a part of this specification, illustrate several embodiments of the invention and together with the description, serve to explain the principles of the invention.

[0021] FIG. 1 shows the Exon 1-exon 2 splice junctions and predicted translation (A) found from RT-PCR products of kidney and adrenal total RNA using exon 1 and exon 3 primers (SEQ ID NOS:135, 134, 137, 136, 132-133, 139, 138, respectively, in order of appearance). The number of independent sequence-verified clones (B) containing either variant 13 G or A in splice products 1 or 2 is shown for kidney and adrenal RNA preparations. The p-value from Fischer's exact test of whether variant 13 affects splice site selection is also shown.

[0022] FIG. 2 shows 5′ RACE analysis of NEDD4L in kidney and adrenal gland. The exonic start location of the most 5′ end for each transcript is shown, as well as the total number of clones and the number of unique 5′ ends found for each transcript. The exonic coordinates locate the 5′ end in the human genome draft assembly hg8 06 Aug. 2001 freeze (www.genome.ucsc.edu, University of California, Santa Cruz) by addition of 65,000,000 bases.

[0023] FIG. 3 shows the Exon-intron structure of the 5′ end of NEDD4L on human chromosome 18q. The exons (FIG. 3A) were defined by searching GenBank Human EST entries and nr databases with NEDD4L exon 3 as the query (CAGTGATCCGTATGTGAAACTTTCATTGTACGTAGCGGATGAGAATAGA GAACTTGCTTTGGTCCAGACAAAAACAATTAAAAAG) (SEQ ID NO: 131). ESTs and cDNAs that have exons spliced 5′ to exon 3 are shown. AF21730 (SEQ ID NO: 180) sequence 5′ of exon 2 is not represented in the current draft sequence of the human genome. The sequences were compared to human genome draft assembly hg8 06 Aug. 2001 freeze to define exon-intron boundaries; all exons conformed to consensus splice sites (5′-AG, 3′-GT). The exonic location and conservation of the C2 domain (FIG. 3B) is shown for NEDD4L transcripts. The alignment of human NEDD4L (SEQ ID NO:141) is shown versus the SMART C2 (SM0239) (SEQ ID NO:140) consensus sequence. The alignments of predicted C2 domains of mouse and Fugu NEDD4L orthologs, and the human NEDD4 paralog, are also shown (SEQ ID NOS:142-151, respectively, in order of appearance).

[0024] FIG. 4 shows the results of quantitative PCR analysis of exon 1-2-3 isoform I versus exon 2a-exon3 isoform III in human kidney (hK), adrenal gland (hA), and liver (hL). Standard curves from a two-fold dilution series of cloned PCR target for both NEDD4L isoforms and human GAPDH were used to calculate the relative ratios of NEDD4L/GAPDH. The NEDD4L/GAPDH ratios are calculated based on predicted molar amounts of target mRNA. The probability that the expression levels are significantly different is shown with p values calculated with a Student's t-test.

[0025] FIG. 5 shows linkage disequilibrium between a GT microsatellite polymorphism located approximately 1.2 Kb 3′ of variant 13. 5A) shows the frequency of linkage between alleles of the microsatellite, alleles being represented by an arbitrary repeat value of between 2 and 17, and either G (solid line) or A (dashed line) of variant 13 in Caucasians. 5B) shows the frequency of linkage between alleles of the microsatellite and either G (solid line) or A (dashed line) of variant 13 in African-Americans (Blacks).

[0026] FIG. 6 shows the linkage between alleles of the microsatellite polymorphism and variant 13-G (solid lines) or variant 13-A (dashed lines). FIG. 6 is expressed as the percentage of variant 13-A or 13-G linked to each allele of the microsatellite polymorphism. Thus, correcting for the allele frequency difference between 13-A and 13-G. 5A) is the linkage disequilibrium present in Caucasians, 5B) is the linkage disequilibrium present in African-Americans (Blacks).

### DETAILED DESCRIPTION OF THE INVENTION

[0027] The present invention may be understood more readily by reference to the following detailed description of preferred embodiments of the invention and the Examples included therein and to the Figures and their previous and following description.

[0028] Before the present compounds, compositions, articles, devices, and/or methods are disclosed and described, it is to be understood that this invention is not limited to specific synthetic methods, specific recombinant biotechnology methods unless otherwise specified, or to particular reagents unless otherwise specified, as such may, of course, vary.

[0029] As used in the specification and the appended claims, the singular forms include the plural unless the context clearly dictates otherwise. Thus, for example, reference to “a pharmaceutical carrier” includes mixtures of two or more such carriers, and the like.

[0030] In this specification and in the claims which follow, reference will be made to a number of terms which shall be defined to have the following meanings:

[0031] “Primers” are a subset of probes which are capable of supporting some type of enzymatic manipulation and which can hybridize with a target nucleic acid such that the enzymatic manipulation can occur. A primer can be made from any combination of nucleotides or nucleotide derivatives or analogs available in the art which do not interfere with the enzymatic manipulation.

[0032] “Probes” are molecules capable of interacting with a target nucleic acid, typically in a sequence specific manner, for example, through hybridization. The hybridization of nucleic acids is well understood in the art and discussed herein. Typically a probe can be made from any combination of nucleotides or nucleotide derivatives or analogs available in the art.

[0033] Throughout this application, various publications are referenced. The disclosures of these publications in their entireties are hereby incorporated by reference into this application. The references disclosed are also individually and specifically incorporated by reference herein for the material contained in them that is discussed in the sentence in which the reference is relied upon.

[0034] It will be apparent to those skilled in the art that various modifications and variations can be made in the present invention without departing from the scope or spirit of the invention. Other embodiments of the invention will be apparent to those skilled in the art from consideration of the specification and practice of the invention disclosed herein. It is intended that the specification and examples be considered as exemplary only, with a true scope and spirit of the invention being indicated by the following claims.

Compositions

[0035] Disclosed are the components to be used to prepare the disclosed compositions as well as the compositions themselves to be used within the methods disclosed herein. These and other materials are disclosed herein, and it is understood that when combinations, subsets, interactions, groups, etc. of these materials are disclosed that while specific reference of each various individual and collective combinations and permutation of these compounds may not be explicitly disclosed, each is specifically contemplated and described herein. For example, if a particular NEDD4L is disclosed and discussed and a number of modifications that can be made to a number of molecules including the NEDD4L are discussed, specifically contemplated is each and every combination and permutation of NEDD4L and the modifications that are possible unless specifically indicated to the contrary. Likewise, any subset or combination of these is also disclosed. This concept applies to all aspects of this application including, but not limited to, steps in methods of making and using the disclosed compositions. Thus, if there are a variety of additional steps that can be performed it is understood that each of these additional steps can be performed with any specific embodiment or combination of embodiments of the disclosed methods.

NEDD4L

[0036] The appropriate names for the genes are NEDD4 and NEDD4L. These genes have also been referred to as Nedd4-1 and Nedd4-2, respectively. For example, there are two rather similar Nedd4 genes in humans and mouse. They are commonly referred to as Nedd4-1 and Nedd4-2. The HUGO Nomenclature substitutes NEDD4 for Nedd4-1 and NEDD4L (Nedd4-like) for Nedd4-2. NEDD4 is located on chromosome 15. NEDD4L is located in chromosome 18q, the area for which linkage has been reported to phenotypes affecting blood pressure.

[0037] As disclosed herein, NEDD4L leads to the formation of multiple isoforms, which encodes proteins that share a subset of their functional domains. In addition to the shorter isoform investigated thus far in human and mouse (isoform III), disclosed herein is the existence in humans of additional isoforms (for example, isoforms I and II) that includes an additional domain of critical significance for its function. Specifically, the isoforms disclosed encode a protein that includes a C2-domain, a calcium-dependent binding domain that, by promoting association with specific intracellular proteins or lipids, leads to targeting of the protein to the cell membrane. In particular, this domain leads to specific interactions with components of membrane microdomains referred to as “lipid rafts.”

[0038] A consequence of this cellular targeting is that NEDD4L containing the C2 domain, isoforms I & II, will be sorted to regions of the apical membrane where it will come to interact with the epithelial sodium channel (ENaC), affecting its residence time at the cell surface. This in turn exerts a direct effect on sodium reabsorption in distal nephron, with attendant effect on plasma volume and blood pressure regulation.

[0039] Disclosed herein are isoforms of NEDD4L where the gene encodes a C2 domain at the N-terminus of the gene product. As disclosed herein, NEDD4L includes isoforms with and without the C2 domain. The presence of a C2 domain has important implications for the diagnosis and treatment of hypertension and viral infection.

[0040] Budding of enveloped viruses is affected by the ubiquination state of viral proteins, such as viral membrane proteins. The Nedd4 family of ubiquitin-protein ligases (E3s), AIP4, WWP2/AIP2, and Nedd4, have been shown to specifically bind to two PY motifs present within the amino-terminal domain of the latent membrane protein 2A (LMP2A) of Epstein-Barr virus (EBV). PY motifs interact with WW domains through a consensus sequence of xPPxY. Importantly, the ubiquination pathway has been linked to retrovirus budding (Kikonyogo et al. (2001) Proc. Natl. Acad. Sci. USA 98(20):11199-204). The C2 domain of NEDD4L targets the gene product to the plasma membrane and lipid rafts. C2-NEDD4L present in, for example, lipid rafts will facilitate ubiquination of viral proteins and may increase viral production. Therefore, NEDD4L lacking a C2 domain is believed to provide protection from enveloped virus infection.

[0041] Several groups have established linkage between the region of chromosome 19 containing NEDD4L and hypertension. Sodium regulation has also been established as playing a critical role in hypertension. Sodium regulation will be effected by the residence time of ENaC at the cell surface. ENaC contains PY domains which interact with the WW domains found in NEDD4L. The ENaC-PY:WW-NEDD4L interaction is also regulated by, for example, aldosterone, which affects the activity of kinases, such as, serum glucocorticoid kinase (SGK). NEDD4L is a substrate for SGK dependent phosphorylation, which allows for increased interaction between ENaC and NEDD4L. As a consequence increased phosphorylation allows for increased ubiquination of ENaC. For example, mutations in the PY domain of ENaC are associated with Liddle's Syndrome. NEDD4L with a C2 domain is preferencially localized to the cell membrane where ENaC functions. Thus, localization of NEDD4L to the cellular membrane can decrease the residence time of ENaC and alter sodium retention.

[0042] Hypertension may be divided into two categories. The first is volume expanded, which may result from sodium retention. The second is volume constricted, which may result from vaso constriction. Typically, hypertension is treated with drugs that effect one of the two categories, however, selection of a treating drug is typically a matter of trial and error or the use of a combination of the two categories of drugs.

[0043] The invention disclosed herein allows a treating physician to make an informed choice of hypertensive treatment options. The absence of a C2 domain may lead to increased cation retention or a volume expanded condition. Such a condition may be more effectively treated with volume depleting drugs, such as diuretics and calcium channel blockers.

[0044] Treatment of hypertension in a patient suffering from a volume expanded condition with volume depleting drugs is expected to return the patient to a neutral volume or to a volume constriction condition in a patient, for example, by over correcting the volume expanded condition. Treatment of volume constricted patients with volume depleting drugs may exacerbate the volume constriction.

[0045] Hypertensive patients were screened for position variations, including position variation 13. Because the patients studied were being treated with one or more drugs they were sorted by medication type. Volume depleting drugs constitute medication group 1 and vaso dilators constitute medication group 2. As shown in Table XX, patients in medication group 1, having a G at variant 13 display a significant orthostatic hypotension response.

[0046] One common mutation disclosed herein, referred to as variant 13A, leads to the formation of an aberrant transcript that can no longer generate isoforms encoding a C2 domain. Consequently, this will adversely affect down regulation of ENaC, leading to sodium retention, plasma volume expansion and increased arterial pressure.

[0047] Variant 13A and other mutations in NEDD4L, by their effects on the number of sodium channel units present at the cell surface, have relevance in any human disease involving or affecting cation transport through ENaC, or in the susceptibility or the response to pharmacologic agents that affect transport mediated by the channel.

[0048] Also disclosed is experimental evidence that C2-containing NEDD4 homologs in humans or yeast are targeted in lipid rafts, where they interact with viral proteins involved in assembly and viral budding. Any alteration of this pathway will affect budding of enveloped viruses.

[0049] Therefore, in addition to the role of NEDD4L in blood pressure regulation, mutations in the gene, including variant 13A, are associated with effects on the transport of NEDD4L to lipid rafts, and therefore its participation in processes leading to viral budding. Therefore, mutations in NEDD4L can be associated with individual differences in susceptibility to viral infections.

[0050] Late viral bud maturation of enveloped viruses occurs in lipid rafts and viruses with late domain PY motifs are believed to require NEDD4L for efficient budding. Since the NEDD4L C2 domain is required for lipid raft targeting, then variant 13G can confer increased viral susceptibility.

[0051] The presence of variant 13G results in the targeting of C2-NEDD4L proteins to the cellular membrane and lipid rafts. NEDD4L present in lipid rafts is positioned to facilitate ubiquination of viral membrane proteins, which has been shown to effect viral budding. Therefore, inhibition of the NEDD4L C2 domain activity is an antiviral target.

[0052] The members of the Nedd4/Rsp5 protein family have a unique modular structure consisting of an N-terminal Ca²⁺/lipid-binding (C2) domain, multiple WW protein-protein interaction domains and an E3 ubiquitin ligase HECT domain. The WW domains of the NEDD4 family of ubiquitin ligases specifically interact with the PY domains in ENaC subunits leading to monoubiquitination of ENaC and down-regulation via endocytosis from the plasmid membrane. The vesicles carrying ENaC enter the vacuolar protein sorting pathway leading to recycling to the plasma membrane or targeting to lysosome for degradation (Lemmon and Traub 2000). There are two Nedd4 paralogs in human: NEDD4 (chromosome 15q, GenBank LocusID 4734) and NEDD4L (chromosome 18q, GenBank LocusID 23327). Although NEDD4 orthologs were originally identified as ENaC binding partners using yeast two-hybrid experiments (Staub et al. 1996), it has recently been established that NEDD4L orthologs (also termed human, mouse Nedd4-2 proteins) are more potent regulators of ENaC (Kamynina et al. 2001 a; Kamynina et al. 2001b; Harvey et al. 2001).

[0053] Genetic linkage in a region of human chromosome 18q has been suggested for essential hypertension (Atwood et al. 2001) and postural change in systolic blood pressure (Pankow et al. 2000), and established for orthostatic hypotensive disorder (DeStefano et al. 1998). Significant linkage has also been reported for essential hypertension (Kristjansson et al. 2002) and orthostatic hypotensive disorder (DeStefano et al. 1998) in the vicinity of the peaks of these other reports. This region includes the ubiquitin ligase NEDD4L (GenBank Locus ID 23327). The NEDD4L gene disclosed herein was surveyed for common polymorphisms by resequencing NEDD4L exons. Among multiple polymorphisms identified in the NEDD4L gene, a common variant (population frequency of 30% in Caucasians) at the exon 1 splice junction disrupts the expression of a transcript capable of producing a NEDD4L protein containing a C2 domain. Characterization of the 5′ end of the NEDD4L transcript also reveals multiple transcript isoforms that contain or lack this C2 domain.

[0054] Taken together, linkage evidence implicating chromosome 18q, the significance of NEDD4L in ENaC regulation, association with medicament treatment and orthostatic hypotension in treated hypertensive patients and the putative loss of function resulting from this common splice junction variant indicate that it contributes to essential hypertension and can play a role in viral budding.

Sequence Similarities

[0055] It is understood that as discussed herein the use of the terms homology and identity mean the same thing as similarity. Thus, for example, if the use of the word homology is used between two non-natural sequences it is understood that this is not necessarily indicating an evolutionary relationship between these two sequences, but rather is looking at the similarity or relatedness between their nucleic acid or amino acid sequences. Many of the methods for determining homology between two evolutionarily related molecules are routinely applied to any two or more nucleic acids or proteins for the purpose of measuring sequence similarity regardless of whether they are evolutionarily related or not.

[0056] In general, it is understood that one way to define any known variants and derivatives or those that might arise, of the disclosed genes and proteins herein, is through defining the variants and derivatives in terms of homology to specific known sequences. This identity of particular sequences disclosed herein is also discussed elsewhere herein. In general, variants of genes and proteins herein disclosed typically have at least, about 70, 71, 72, 73, 74, 75, 76, 77, 78, 79, 80, 81, 82, 83, 84, 85, 86, 87, 88, 89, 90, 91, 92, 93, 94, 95, 96, 97, 98, or 99 percent homology to the stated sequence or the native sequence. Those of skill in the art readily understand how to determine the homology of two proteins or nucleic acids, such as genes. For example, the homology can be calculated after aligning the two sequences so that the homology is at its highest level.

[0057] Another way of calculating homology can be performed by published algorithms. Optimal alignment of sequences for comparison may be conducted by the local homology algorithm of Smith and Waterman, Adv. Appl. Math. 2: 482 (1981), by the homology alignment algorithm of Needleman and Wunsch, J. MoL Biol. 48: 443 (1970), by the search for similarity method of Pearson and Lipman, Proc. Natl. Acad. Sci. U.S.A. 85: 2444 (1988), by computerized implementations of these algorithms (GAP, BESTFIT, FASTA, and TFASTA in the Wisconsin Genetics Software Package, Genetics Computer Group, 575 Science Dr., Madison, Wis.), or by inspection.

[0058] The same types of homology can be obtained for nucleic acids by, for example, the algorithms disclosed in Zuker, M. Science 244:48-52, 1989, Jaeger et al. Proc. Natl. Acad. Sci. USA 86:7706-7710, 1989, Jaeger et al. Methods Enzymol. 183:281-306, 1989 which are herein incorporated by reference for at least material related to nucleic acid alignment. It is understood that any of the methods typically can be used and that in certain instances the results of these various methods may differ, but the skilled artisan understands if identity is found with at least one of these methods, the sequences would be said to have the stated identity, and be disclosed herein.

Hybridization/Selective Hybridization

[0059] The term hybridization typically means a sequence driven interaction between at least two nucleic acid molecules, such as a primer or a probe and a gene. Sequence driven interaction means an interaction that occurs between two nucleotides or nucleotide analogs or nucleotide derivatives in a nucleotide specific manner. For example, G interacting with C or A interacting with T are sequence driven interactions. Typically sequence driven interactions occur on the Watson-Crick face or Hoogsteen face of the nucleotide. The hybridization of two nucleic acids is affected by a number of conditions and parameters known to those of skill in the art. For example, the salt concentrations, pH, and temperature of the reaction all affect whether two nucleic acid molecules will hybridize.

[0060] Parameters for selective hybridization between two nucleic acid molecules are well known to those of skill in the art. For example, in some embodiments selective hybridization conditions can be defined as stringent hybridization conditions. For example, stringency of hybridization is controlled by both temperature and salt concentration of either or both of the hybridization and washing steps. For example, the conditions of hybridization to achieve selective hybridization may involve hybridization in high ionic strength solution (6×SSC or 6×SSPE) at a temperature that is about 12-25° C. below the Tm (the melting temperature at which half of the molecules dissociate from their hybridization partners) followed by washing at a combination of temperature and salt concentration chosen so that the washing temperature is about 5° C. to 20° C. below the Tm. The temperature and salt conditions are readily determined empirically in preliminary experiments in which samples of reference DNA immobilized on filters are hybridized to a labeled nucleic acid of interest and then washed under conditions of different stringencies. Hybridization temperatures are typically higher for DNA-RNA and RNA-RNA hybridizations. The conditions can be used as described above to achieve stringency, or as is known in the art. (Sambrook et al., Molecular Cloning: A Laboratory Manual, 2nd Ed., Cold Spring Harbor Laboratory, Cold Spring Harbor, N.Y., 1989; Kunkel et al. Methods Enzymol. 1987:154:367, 1987 which is herein incorporated by reference for material at least related to hybridization of nucleic acids.) A preferable stringent hybridization condition for a DNA:DNA hybridization can be at about 68° C. (in aqueous solution) in 6×SSC or 6×SSPE followed by washing at 68° C. Stringency of hybridization and washing, if desired, can be reduced accordingly as the degree of complementarity desired is decreased, and further, depending upon the G-C or A-T richness of any area wherein variability is searched for. Likewise, stringency of hybridization and washing, if desired, can be increased accordingly as homology desired is increased, and further, depending upon the G-C or A-T richness of any area wherein high homology is desired, all as known in the art.

[0061] Another way to define selective hybridization is by looking at the amount (percentage) of one of the nucleic acids bound to the other nucleic acid. For example, in some embodiments selective hybridization conditions would be when at least about 60, 65, 70, 71, 72, 73, 74, 75, 76, 77, 78, 79, 80, 81, 82, 83, 84, 85, 86, 87, 88, 89, 90, 91, 92, 93, 94, 95, 96, 97, 98, 99, or 100 percent of the available limiting nucleic acid is bound to the non-limiting nucleic acid. Typically, the non-limiting primer is in, for example, 10 or 100 or 1000 fold excess. This type of assay can be performed under conditions where both the limiting and non-limiting primer are, for example, 10 fold or 100 fold or 1000 fold below their k_{d}, or where only one of the nucleic acid molecules is 10 fold or 100 fold or 1000 fold or where one or both nucleic acid molecules are above their k_{d}.

[0062] Another way to define selective hybridization is by looking at the percentage of primer that gets enzymatically manipulated under conditions where hybridization is required to promote the desired enzymatic manipulation. For example, in some embodiments selective hybridization conditions would be when at least about 60, 65, 70, 71, 72, 73, 74, 75, 76, 77, 78, 79, 80, 81, 82, 83, 84, 85, 86, 87, 88, 89, 90, 91, 92, 93, 94, 95, 96, 97, 98, 99, or 100 percent of the available primer is enzymatically manipulated under conditions which promote the enzymatic manipulation, for example, if the enzymatic manipulation is DNA extension, then selective hybridization conditions would be when at least about 60, 65, 70, 71, 72, 73, 74, 75, 76, 77, 78, 79, 80, 81, 82, 83, 84, 85, 86, 87, 88, 89, 90, 91, 92, 93, 94, 95, 96, 97, 98, 99, or 100 percent of the primer molecules are extended. Preferred conditions also include those suggested by the manufacturer or indicated in the art as being appropriate for the enzyme performing the manipulation.

[0063] Alternatively, selective hybridization may be defined by a functional determinant. For example, primers used in a polymerase chain reaction (PCR), are said to bind specifically when amplification of the target sequence results in unique bands of the expected length.

[0064] Just as with homology, it is understood that there are a variety of methods herein disclosed for determining the level of hybridization between two nucleic acid molecules. It is understood that these methods and conditions may provide different percentages of hybridization between two nucleic acid molecules, but unless otherwise indicated meeting the parameters of any of the methods would be sufficient. For example, if 80% hybridization was required and as long as hybridization occurs within the required parameters in any one of these methods it is considered disclosed herein.

[0065] It is understood that those of skill in the art understand that if a composition or method meets any one of these criteria for determining hybridization either collectively or singly it is a composition or method that is disclosed herein.

Nucleic Acids

[0066] There are a variety of molecules disclosed herein that are nucleic acid based, including, for example, the nucleic acids that encode NEDD4L, homologs, orthologs, or fragments of the same, gene products as well as various functional nucleic acids. The disclosed nucleic acids are made up of, for example, nucleotides, nucleotide analogs, or nucleotide substitutes. Non-limiting examples of these and other molecules are discussed herein. It is understood that, for example, when a vector is expressed in a cell, that the expressed mRNA will typically be made up of A, C, G, and U. Likewise, it is understood that if, for example, an antisense molecule is introduced into a cell or cell environment through, for example, exogenous delivery, it is advantageous that the antisense molecule be made up of nucleotide analogs that reduce the degradation of the antisense molecule in the cellular environment.

Nucleotides and Related Molecules

[0067] A nucleotide is a molecule that contains a base moiety, a sugar moiety and a phosphate moiety. Nucleotides can be linked together through their phosphate moieties and sugar moieties creating an internucleoside linkage. A non-limiting example of a nucleotide would be 3′-AMP (3′-adenosine monophosphate) or 5′-GMP (5′-guanosine monophosphate).

[0068] A nucleotide analog is a nucleotide which contains some type of modification to either the base, sugar, or phosphate moieties. Modifications to nucleotides are well known in the art and would include, for example, 5-methylcytosine (5-me-C), 5-hydroxymethyl cytosine, xanthine, hypoxanthine, and 2-aminoadenine as well as modifications at the sugar or phosphate moieties.

[0069] Nucleotide substitutes are molecules having similar functional properties to nucleotides, but which do not contain a phosphate moiety, such as peptide nucleic acid (PNA). Nucleotide substitutes are molecules that will recognize nucleic acids in a Watson-Crick or Hoogsteen manner, but which are linked together through a moiety other than a phosphate moiety. Nucleotide substitutes are able to conform to a double helix type structure when interacting with the appropriate target nucleic acid.

[0070] It is also possible to link other types of molecules (conjugates) to nucleotides or nucleotide analogs to enhance, for example, cellular uptake. Conjugates can be chemically linked to the nucleotide or nucleotide analogs. Such conjugates include but are not limited to lipid moieties such as a cholesterol moiety. (Letsinger et al., Proc. Natl. Acad. Sci. USA, 1989,86, 6553-6556.)

Sequences

[0071] There are a variety of sequences related to the NEDD4L, homologs and orthologs, or fragments of the same, for example, having Genbank Accession Numbers discussed herein. These sequences and others are herein incorporated by reference to their Genbank Accession numbers in their entireties as well as for individual subsequences contained therein.

[0072] The particular sequences set forth herein and having the Genbank accession numbers are used herein, for example, to exemplify the disclosed compositions and methods. It is understood that the description related to this sequence is applicable to any sequence related to NEDD4L, homologs and orthologs, or fragments of the same, unless specifically indicated otherwise. Sequence discrepancies and differences can be adjusted to, and the compositions and methods relating to a particular sequence can be applied to other related sequences (i.e., sequences of NEDD4L homologs and orthologs, or fragments of the same,). Primers and/or probes can be designed for any NEDD4L, NEDD4 or ortholog sequence given the information disclosed herein.

Variant 13A Region of NEDD4L

[0073] The variant 1 3A of NEDD4L occurs at the splice junction of Exon 1. This mutation leads to an NEDD4L isoform that lacks a C2 domain. This mutation was found to be present in 30% of the caucasian and African-american population. It is understood that this variant can be assayed in any population or subpopulation of individuals given the information and direction contained herein indicating that this variant is related to hypertension. Assaying for the presence of this variant or other variants using primers or probes as described herein is desirable for determining an individual's predisposition for acquiring or being susceptible to hypertension and/or viral infection. NEDD4L has been sequenced in a large number of individuals. NEDD4L, Variant 13A, is associated with orthostatic hypotension of patients receiving volume deleting hypertension drugs.

Primers and Probes

[0074] Disclosed are compositions including primers and probes, which are capable of interacting with the NEDD4L gene, homologs and orthologs, or fragments of the same, as disclosed herein. It is understood that if the specification identifies NEDD4L gene, homologs and orthologs, or fragments of the same, that this could also refer to related nucleic acids, such as the mRNA or cDNA unless specifically indicated to the contrary or by what one of skill in the art understands. In certain embodiments the primers are used to support DNA amplification reactions. Typically the primers will be capable of being extended in a sequence specific manner. Extension of a primer in a sequence specific manner includes any methods wherein the sequence and/or composition of the nucleic acid molecule to which the primer is hybridized or otherwise associated directs or influences the composition or sequence of the product produced by the extension of the primer. Extension of the primer in a sequence specific manner therefore includes, but is not limited to, PCR, DNA sequencing, DNA extension, DNA polymerization, RNA transcription, or reverse transcription. Techniques and conditions that amplify the primer in a sequence specific manner are preferred. In certain embodiments the primers are used for the DNA amplification reactions, such as PCR or direct sequencing. It is understood that in certain embodiments the primers can also be extended using non-enzymatic techniques, where, for example, the nucleotides or oligonucleotides used to extend the primer are modified such that they will chemically react to extend the primer in a sequence specific manner. Typically the disclosed primers hybridize with a region or regions of the NEDD4L gene, homologs and orthologs, or fragments of the same, or they hybridize with a region or regions of the complement of the NEDD4L gene, homologs and orthologs, or fragments of the same.

[0075] The size of the primers or probes for interaction with the NEDD4L gene, homologs and orthologs, or fragments of the same, in certain embodiments can be any size that supports the desired enzymatic manipulation of the primer, such as DNA amplification or the simple hybridization of the probe or primer. A typical NEDD4L gene, NEDD4 gene or homologs and orthologs, or fragments of the same, primer or probe would be at least 6-15, 15-20, 20-25, 25-30, 30-35, 35-40, 40-45, 45-55, 55-65, 75-100, 100-200, 200-300, 300-400, 400-500, 500-600, 600-700, 700-800, 800-900, 900-1000, 1000-2000, 2000-3000 or 3000-4000 nucleotides long.

[0076] In other embodiments an NEDD4L gene, NEDD4 gene orhomologs and orthologs, or fragments of the same, primer or probe can be less than or equal to 6-15, 15-20, 20-25, 25-30, 30-35, 35-40, 40-45, 45-55, 55-65, 75-100, 100-200, 200-300, 300-400, 400-500, 500-600, 600-700, 700-800, 800-900, 900-1000, 1000-2000, 2000-3000 or 3000-4000 nucleotides long.

[0077] In certain embodiments the primers and probes are designed such that they are primers whose nearest point of interaction with the NEDD4L gene, or homologs and orthologs, or fragments of the same, is within 0, 1, 2, 3, 4, 5, 6, 7, 8, 9, 10, 11, 12, 13, 14, 15, 16, 17, 18, 19, 20, 21, 22, 23, 24, 25, 26, 27, 28, 29, 30, 31, 32, 33, 34, 35, 36, 37, 38, 39, 40, 41, 42, 43, 44, 45, 46, 47, 48, 49, 50, 51, 52, 53, 54, 55, 56, 57, 58, 59, 60, 61, 62, 63, 64, 65, 66, 67, 68, 69, 70, 71, 72, 73, 74, 75, 76, 77, 78, 79, 80, 81, 82, 83, 84, 85, 86, 87, 88, 89, 90, 91, 92, 93, 94, 95, 96, 97, 98, 99, 100, 125, 150, 175, 200, 300, 400, 500, or 1000 nucleotides of the position of the variant 13 A within the NEDD4L gene, NEDD4 gene or homologs and orthologs, or fragments of the same.

[0078] For example, for a particular NEDD4L gene or homolog (identified in the chromosome 18 draft assembly hg8 from the August 6, 2001 freeze, with coordinates indexed to base 65,000,000), certain embodiments of the primer or probe would be designed such that they are primers or probes whose nearest point of interaction to the position of variant 13, or another variant listed in Table 3, as discussed herein, with this particular NEDD4L gene or homolog, would occur at about 1 bp to 1 kb from variant 13, or another variant listed in Table 3. The primer or probe may interact with either strand of a duplex DNA in either direction, 5′ or 3′, form variant 13, or another variant listed in Table 3. It is understood that there is a similar position in each homologue and ortholog of NEDD4L.

[0079] It is understood that the primer or probe can interact with the NEDD4L gene, NEDD4 gene, or homologs and orthologs, or fragments of the same, at any point such that sequence data regarding variant 13 can be obtained for any individual or DNA sample. For example, numerous variants are disclosed herein, which show genetic linkage to variant 13. A primer or probe that establishes the presence or absence of another variant is understood to provide sequence data regarding variant 13.

[0080] The primers for the NEDD4L gene, homologs and orthologs, or fragments of the same, typically will be used to produce an amplified DNA product that contains sequence information regarding the variant 13 region of the NEDD4L gene, homologs and orthologs, or fragments of the same, or such that any sequence information is obtained regarding any of the specific variants discussed in Table 3. In general, typically the size of the product will be such that the size can be accurately determined to within 3, or 2 or 1 nucleotides.

[0081] In certain embodiments the product of the primer or probe is at least 20-25, 25-30, 30-35, 35-40, 40-45, 45-55, 55-65, 75-100, 100-200, 200-300, 300-400, 400-500, 500-600, 600-700, 700-800, 800-900, 900-1000, 1000-2000, 2000-3000 or 3000-4000 nucleotides long. In other embodiments the product is less than or equal to 20-25, 25-30, 30-35, 35-40, 40-45, 45-55, 55-65, 75-100, 100-200, 200-300, 300-400, 400-500, 500-600, 600-700, 700-800, 800-900, 900-1000, 1000-2000, 2000-3000 or 3000-4000 nucleotides long.

Functional Nucleic Acids

[0082] Functional nucleic acids are nucleic acid molecules that have a specific function, such as binding a target molecule or catalyzing a specific reaction. Functional nucleic acid molecules can be divided into the following categories, which are not meant to be limiting. For example, functional nucleic acids include antisense molecules, aptamers, ribozymes, triplex forming molecules, and external guide sequences. The functional nucleic acid molecules can act as affectors, inhibitors, modulators, and stimulators of a specific activity possessed by a target molecule, or the functional nucleic acid molecules can possess a de novo activity independent of any other molecules.

[0083] Functional nucleic acid molecules can interact with any macromolecule, such as DNA, RNA, polypeptides, or carbohydrate chains. Thus, functional nucleic acids can interact with the mRNA of NEDD4L gene, homologs and orthologs, or fragments of the same, or the genomic DNA of NEDD4L gene, homologs and orthologs, or fragments of the same, or they can interact with the polypeptide encoded by the NEDD4L gene, homologs and orthologs, or fragments of the same. Often functional nucleic acids are designed to interact with other nucleic acids based on sequence homology between the target molecule and the functional nucleic acid molecule. In other situations, the specific recognition between the functional nucleic acid molecule and the target molecule is not based on sequence homology between the functional nucleic acid molecule and the target molecule, but rather is based on the formation of tertiary structure that allows specific recognition to take place. As discussed herein functional nucleic acids that can distinguish NEDD4L gene products, or homologs and orthologs, or fragments of the same, gene products having a C2 domain related to the splicing at Exon 1 are disclosed. These functional nucleic acids can be used in a variety of ways, including as competitive inhibitors of ENaC protein interactions.

[0084] Antisense molecules are designed to interact with a target nucleic acid molecule through either canonical or non-canonical base pairing. The interaction of the antisense molecule and the target molecule is designed to promote the destruction of the target molecule through, for example, RNAseH mediated RNA-DNA hybrid degradation. Alternatively the antisense molecule is designed to interrupt a processing function that normally would take place on the target molecule, such as transcription or replication. Antisense molecules can be designed based on the sequence of the target molecule. Numerous methods for optimization of antisense efficiency by finding the most accessible regions of the target molecule exist. Exemplary methods would be in vitro selection experiments and DNA modification studies using DMS and DEPC. It is preferred that antisense molecules bind the target molecule with a dissociation constant (k_{d}) less than 10⁻⁶, preferable less than 10⁻⁸, more preferably less than 10⁻¹⁰, more preferably less than 10⁻¹². A representative sample of methods and techniques which aid in the design and use of antisense molecules can be found in the following non-limiting list of U.S. Pat. Nos. 5,135,917, 5,294,533, 5,627,158, 5,641,754, 5,691,317, 5,780,607, 5,786,138, 5,849,903, 5,856,103, 5,919,772, 5,955,590, 5,990,088, 5,994,320, 5,998,602, 6,005,095, 6,007,995, 6,013,522, 6,017,898, 6,018,042, 6,025,198, 6,033,910, 6,040,296, 6,046,004, 6,046,319, and 6,057,437.

[0085] Aptamers are molecules that interact with a target molecule, preferably in a specific way. Typically aptamers are small nucleic acids ranging from 15-50 bases in length that fold into defined secondary and tertiary structures, such as stem-loops or G-quartets. Aptamers can bind small molecules, such as ATP (U.S. Pat. Nos. 5,631,146) and theophiline (U.S. Pat. No. 5,580,737), as well as large molecules, such as reverse transcriptase (U.S. Pat. No. 5,786,462) and thrombin (U.S. Pat. No. 5,543,293). Aptamers can bind very tightly with k_{d} from the target molecule of less than 10⁻¹² M. Aptamers can bind the target molecule with a very high degree of specificity, for example, with a k_{d} less than 10⁻⁶, preferable less than 10⁻⁸, more preferably less than 10⁻¹⁰, more preferably less than 10⁻¹². For example, aptamers have been isolated that have greater than a 10,000 fold difference in binding affinities between the target molecule and another molecule that differ at only a single position on the molecule (U.S. Pat. No. 5,543,293). It is preferred that the aptamer have a k_{d} with the target molecule at least 10 to 10,000 fold lower than the k_{d} with a background binding molecule. It is preferred when doing the comparison for a polypeptide, for example, that the background molecule be a different polypeptide. For example, when determining the specificity of NEDD4L gene product, or homologs and orthologs, or fragments of the same, gene product aptamers, for example, aptamers specific for the C2 domain of NEDD4L, the background protein could be serum albumin. Representative examples of how to make and use aptamers to bind a variety of different target molecules can be found in the following non-limiting list of U.S. Pat. Nos. 5,476,766, 5,503,978, 5,631,146, 5,731,424, 5,780,228, 5,792,613, 5,795,721, 5,846,713, 5,858,660, 5,861,254, 5,864,026, 5,869,641, 5,958,691, 6,001,988, 6,011,020, 6,013,443, 6,020,130, 6,028,186, 6,030,776, and 6,051,698.

[0086] Ribozymes are nucleic acid molecules that are capable of catalyzing a chemical reaction, either intramolecularly or intermolecularly. Ribozymes are thus catalytic nucleic acid. It is preferred that the ribozymes catalyze intermolecular reactions. There are a number of different types of ribozymes that catalyze nuclease or nucleic acid polymerase type reactions which are based on ribozymes found in natural systems, such as hammerhead ribozymes, (for example, but not limited to the following U.S. Pat. Nos. 5,334,711, 5,436,330, 5,616,466, 5,633,133, 5,646,020, 5,652,094, 5,712,384, 5,770,715, 5,856,463, 5,861,288, 5,891,683, 5,891,684, 5,985,621, 5,989,908, 5,998,193, 5,998,203, International Publication WO 9858058 by Ludwig and Sproat, WO 9858057 by Ludwig and Sproat, and WO 9718312 by Ludwig and Sproat) hairpin ribozymes (for example, but not limited to the following U.S. Pat. Nos. 5,631,115, 5,646,031, 5,683,902, 5,712,384, 5,856,188, 5,866,701, 5,869,339, and 6,022,962), and tetrahymena ribozymes (for example, but not limited to the following U.S. Pat. Nos. 5,595,873 and 5,652,107). There are also a number of ribozymes that are not found in natural systems, but which have been engineered to catalyze specific reactions de novo (for example, but not limited to the following U.S. Pat. Nos. 5,580,967, 5,688,670, 5,807,718, and 5,910,408). Preferred ribozymes cleave RNA or DNA substrates, and more preferably cleave RNA substrates. Ribozymes typically cleave nucleic acid substrates through recognition and binding of the target substrate with subsequent cleavage. This recognition is often based mostly on canonical or non-canonical base pair interactions. This property makes ribozymes particularly good candidates for target specific cleavage of nucleic acids because recognition of the target substrate is based on the target substrates sequence. Representative examples of how to make and use ribozymes to catalyze a variety of different reactions can be found in the following non-limiting list of U.S. Pat. Nos. 5,646,042, 5,693,535, 5,731,295, 5,811,300, 5,837,855, 5,869,253, 5,877,021, 5,877,022, 5,972,699, 5,972,704, 5,989,906, and 6,017,756.

[0087] Triplex forming functional nucleic acid molecules are molecules that can interact with either double-stranded or single-stranded nucleic acid. When triplex molecules interact with a target region, a structure called a triplex is formed, in which there are three strands of DNA forming a complex dependant on both Watson-Crick and Hoogsteen base-pairing. Triplex molecules are preferred because they can bind target regions with high affinity and specificity, for example, with a K_{d} less than 10⁻¹², 10⁻¹⁰, 10⁻⁸ or 10⁻⁶. Representative examples of how to make and use triplex forming molecules to bind a variety of different target molecules can be found in the following non-limiting list of U.S. Pat. Nos. 5,176,996, 5,645,985, 5,650,316, 5,683,874, 5,693,773, 5,834,185, 5,869,246, 5,874,566, and 5,962,426.

[0088] External guide sequences (EGSs) are molecules that bind a target nucleic acid molecule forming a complex, and this complex is recognized by RNase P, which cleaves the target molecule. EGSs can be designed to specifically target a RNA molecule of choice. RNAse P aids in processing transfer RNA (tRNA) within a cell. Bacterial RNAse P can be recruited to cleave virtually any RNA sequence by using an EGS that causes the target RNA:EGS complex to mimic the natural tRNA substrate. (International Publication WO 92/03566 by Yale, and Forster and Altman, Science 238:407-409 (1990)).

[0089] Similarly, eukaryotic EGS/RNAse P-directed cleavage of RNA can be utilized to cleave desired targets within eukarotic cells. (Yuan et al., Proc. Natl. Acad. Sci. USA 89:8006-8010 (1992); WO 93/22434 by Yale; WO 95/24489 by Yale; Yuan and Altman, EMBO J 14:159-168 (1995), and Carrara et al., Proc. Natl. Acad. Sci. USA 92:2627-2631 (1995).) Representative examples of how to make and use EGS molecules to facilitate cleavage of a variety of different target molecules be found in the following non-limiting list of U.S. Pat. Nos. 5,168,053, 5,624,824, 5,683,873, 5,728,521, 5,869,248, and 5,877,162.

Peptides

Protein Variants

[0090] As discussed herein there are numerous variants of the NEDD4L gene product, NEDD4 gene product, or homologs and orthologs, or fragments of the same, gene product that are known and herein contemplated. Protein variants and derivatives are well understood to those of skill in the art and in can involve amino acid sequence modifications. For example, amino acid sequence modifications typically fall into one or more of three classes: substitutional, insertional or deletional variants. Insertions include amino and/or carboxyl terminal fusions as well as intrasequence insertions of single or multiple amino acid residues. Insertions ordinarily will be smaller insertions than those of amino or carboxyl terminal fusions, for example, on the order of one to four residues. Immunogenic fusion protein derivatives, such as those described in the examples, are made by fusing a polypeptide sufficiently large to confer immunogenicity to the target sequence by cross-linking in vitro or by recombinant cell culture transformed with DNA encoding the fusion. Deletions are characterized by the removal of one or more amino acid residues from the protein sequence. Typically, no more than about from 2 to 6 residues are deleted at any one site within the protein molecule. These variants ordinarily are prepared by site specific mutagenesis of nucleotides in the DNA encoding the protein, thereby producing DNA encoding the variant, and thereafter expressing the DNA in recombinant cell culture. Techniques for making substitution mutations at predetermined sites in DNA having a known sequence are well known, for example, M13 primer mutagenesis and PCR mutagenesis. Amino acid substitutions are typically of single residues, but can occur at a number of different locations at once; insertions usually will be on the order of about from 1 to 10 amino acid residues; and deletions will range about from 1 to 30 residues. Deletions or insertions preferably are made in adjacent pairs, i.e., a deletion of 2 residues or insertion of 2 residues. Substitutions, deletions, insertions or any combination thereof may be combined to arrive at a final construct. Substitutional variants are those in which at least one residue has been removed and a different residue inserted in its place. Such substitutions generally are made in accordance with the following Table 1 and are referred to as conservative substitutions.

TABLE 1
Amino Acid Substitutions

| | Exemplary Conservative |
|---|---|
| Original | Substitutions, others |
| Residue | are known in the art. |
| Ala | ser |
| Arg | lys, gln |
| Asn | gln; his |
| Asp | glu |
| Cys | ser |
| Gln | asn, lys |
| Glu | asp |
| Gly | ala |
| His | asn; gln |
| Ile | leu; val |
| Leu | ile; val |
| Lys | arg; gln; |
| Met | Leu; ile |
| Phe | met; leu; tyr |
| Ser | thr |
| Thr | ser |
| Trp | tyr |
| Tyr | trp; phe |
| Val | lile; leu |

[0091] Substantial changes in function or immunological identity are made by selecting substitutions that are less conservative than those in Table 2, i.e., selecting residues that differ more significantly in their effect on maintaining (a) the structure of the polypeptide backbone in the area of the substitution, for example, as a sheet or helical conformation, (b) the charge or hydrophobicity of the molecule at the target site or (c) the bulk of the side chain. The substitutions which in general are expected to produce the greatest changes in the protein properties will be those in which (a) a hydrophilic residue, e.g., seryl or threonyl, is substituted for (or by) a hydrophobic residue, e.g., leucyl, isoleucyl, phenylalanyl, valyl or alanyl; (b) a cysteine or proline is substituted for (or by) any other residue; (c) a residue having an electropositive side chain, e.g., lysyl, arginyl, or histidyl, is substituted for (or by) an electronegative residue, e.g., glutamyl or aspartyl; or (d) a residue having a bulky side chain, e.g., phenylalanine, is substituted for (or by) one not having a side chain, e.g., glycine, in this case, (e) by increasing the number of sites for sulfation and/or glycosylation.

[0092] For example, the replacement of one amino acid residue with another that is biologically and/or chemically similar is known to those skilled in the art as a conservative substitution. For example, a conservative substitution would be replacing one hydrophobic residue for another, or one polar residue for another. The substitutions include combinations such as, for example, Gly, Ala; Val, Ile, Leu; Asp, Glu; Asn, Gln; Ser, Thr; Lys, Arg; Phe; and Tyr. Such conservatively substituted variations of each explicitly disclosed sequence are included within the mosaic polypeptides provided herein.

[0093] Substitutional or deletional mutagenesis can be employed to insert sites for N-glycosylation (Asn-X-Thr/Ser) or O-glycosylation (Ser or Thr). Deletions of cysteine or other labile residues also may be desirable. Deletions or substitutions of potential proteolysis sites, e.g. Arg, is accomplished, for example, by deleting one of the basic residues or substituting one by glutaminyl or histidyl residues.

[0094] Certain post-translational derivatizations are the result of the action of recombinant host cells on the expressed polypeptide. Glutaminyl and asparaginyl residues are frequently post-translationally deamidated to the corresponding glutamyl and asparyl residues. Alternatively, these residues are deamidated under mildly acidic conditions. Other post-translational modifications include hydroxylation of proline and lysine, phosphorylation of hydroxyl groups of seryl or threonyl residues, methylation of the o-amino groups of lysine, arginine, and histidine side chains (T. E. Creighton, Proteins: Structure and Molecular Properties, W. H. Freeman & Co., San Francisco pp 79-86 [1983]), acetylation of the N-terminal amine and, in some instances, amidation of the C-terminal carboxyl.

[0095] As discussed herein, a functional fragment is part of a molecule which retains a specified function. For example, the C2 domain of the protein may be expressed as a fragment or as a part of a fusion protein, where the C2 domain retains the function of targeting the molecule to the appropriate cellular location. For example, the C2 domain may be fused to one or more other domains, whereby the one or more other domains can be targeted to the plasma membrane and/or lipid rafts. In the context of nucleic acid used to screen for the presence of variant 13 or another variant, the nucleic acid need not code for the NEDD4L gene product and must only be of sufficient size to uniquely identify the target sequence.

Antibodies

Antibodies Generally

[0096] The term “antibodies” is used herein in a broad sense and includes both polyclonal and monoclonal antibodies. In addition to intact immunoglobulin molecules, also included in the term “antibodies” are fragments or polymers of those immunoglobulin molecules, and human or humanized versions of immunoglobulin molecules or fragments thereof, as long as they are chosen for their ability to interact with NEDD4L gene, NEDD4 gene, or homologs and orthologs, or fragments of the same, or gene products such that, for example, the C2 domain is specifically recognized, as disclosed herein. The antibodies can be tested for their desired activity using the in vitro assays described herein, or by analogous methods, after which their in vivo therapeutic and/or prophylactic activities are tested according to known clinical testing methods. Also disclosed are functional equivalents of antibodies.

[0097] The term “monoclonal antibody” as used herein refers to an antibody obtained from a substantially homogeneous population of antibodies, i.e., the individual antibodies within the population are identical except for possible naturally occurring mutations that may be present in a small subset of the antibody molecules. The monoclonal antibodies herein specifically include “chimeric” antibodies in which a portion of the heavy and/or light chain is identical with or homologous to corresponding sequences in antibodies derived from a particular species or belonging to a particular antibody class or subclass, while the remainder of the chain(s) is identical with or homologous to corresponding sequences in antibodies derived from another species or belonging to another antibody class or subclass, as well as fragments of such antibodies, as long as they exhibit the desired antagonistic activity (See, U.S. Pat. No. 4,816,567 and Morrison et al., Proc. Natl. Acad. Sci. USA, 81:6851-6855 (1984)).

[0098] The disclosed monoclonal antibodies can be made using any procedure which produces monoclonal antibodies. For example, monoclonal antibodies of the invention can be prepared using hybridoma methods, such as those described by Kohler and Milstein, Nature, 256:495 (1975). In a hybridoma method, a mouse or other appropriate host animal is typically immunized with an immunizing agent to elicit lymphocytes that produce or are capable of producing antibodies that will specifically bind to the immunizing agent.

[0099] The monoclonal antibodies may also be made by recombinant DNA methods, such as those described in U.S. Pat. No. 4,816,567 (Cabilly et al.). DNA encoding the disclosed monoclonal antibodies can be readily isolated and sequenced using conventional procedures (e.g., by using oligonucleotide probes that are capable of binding specifically to genes encoding the heavy and light chains of murine antibodies). Libraries of antibodies or active antibody fragments can also be generated and screened using phage display techniques, e.g., as described in U.S. Pat. No. 5,804,440 to Burton et al. and U.S. Pat. No. 6,096,441 to Barbas III et al.

[0100] In vitro methods are also suitable for preparing monovalent antibodies. Digestion of antibodies to produce fragments thereof, particularly, Fab fragments, can be accomplished using routine techniques known in the art. For instance, digestion can be performed using papain. Examples of papain digestion are described in WO 94/29348 published Dec. 22, 1994 and U.S. Pat. No. 4,342,566. Papain digestion of antibodies typically produces two identical antigen binding fragments, called Fab fragments, each with a single antigen binding site, and a residual Fc fragment. Pepsin treatment yields a fragment that has two antigen combining sites and is still capable of cross-linking antigen.

[0101] The fragments, whether attached to other sequences or not, can also include insertions, deletions, substitutions, or other selected modifications of particular regions or specific amino acids residues, provided the activity of the antibody or antibody fragment is not significantly altered or impaired compared to the non-modified antibody or antibody fragment. These modifications can provide for some additional property, such as to remove/add amino acids capable of disulfide bonding, to increase its bio-longevity, to alter its secretory characteristics, etc. In any case, the antibody or antibody fragment must possess a bioactive property, such as specific binding to its cognate antigen. Functional or active regions of the antibody or antibody fragment may be identified by mutagenesis of a specific region of the protein, followed by expression and testing of the expressed polypeptide. Such methods are readily apparent to a skilled practitioner in the art and can include site-specific mutagenesis of the nucleic acid encoding the antibody or antibody fragment. (Zoller, M. J. Curr. Opin. Biotechnol. 3:348-354, 1992).

[0102] However, an antibody, human, humanized or non-human, can be used to screen biological samples for the presence of the antigen. For example, a monoclonal antibody can be generated which specifically recognizes the C2 domain of NEDD4L and used to screen a sample, for example, a human tissue sample, for the presence of NEDD4L having a C2 domain. The sample may be screened using methods known in the art, for example, an enzyme-linked immunosorbent (ELISA) assay, Western blots, affinity chromatography, or the like.

[0103] As used herein, the term “antibody” or “antibodies” can also refer to a human antibody and/or a humanized antibody. Many non-human antibodies (e.g., those derived from mice, rats, or rabbits) are naturally antigenic in humans, and thus can give rise to undesirable immune responses when administered to humans. Therefore, the use of human or humanized antibodies in the methods of the invention serves to lessen the chance that an antibody administered to a human will evoke an undesirable immune response.

Human Antibodies

[0104] The human antibodies of the invention can be prepared using any technique. Examples of techniques for human monoclonal antibody production include those described by Cole et al. (Monoclonal Antibodies and Cancer Therapy, Alan R. Liss, p. 77, 1985) and by Boerner et al. (J. Immunol., 147(1):86-95, 1991). Human antibodies of the invention (and fragments thereof) can also be produced using phage display libraries (Hoogenboom et al., J. Mol. Biol., 227:381, 1991; Marks et al., J. Mol. Biol., 222:581, 1991).

[0105] The human antibodies of the invention can also be obtained from transgenic animals. For example, transgenic, mutant mice that are capable of producing a full repertoire of human antibodies, in response to immunization, have been described (see, e.g., Jakobovits et al., Proc. Natl. Acad. Sci. USA, 90:2551-255 (1993); Jakobovits et al., Nature, 362:255-258 (1993); Bruggermann et al., Year in Immunol., 7:33 (1993)). Specifically, the homozygous deletion of the antibody heavy chain joining region (J(H)) gene in these chimeric and germ-line mutant mice results in complete inhibition of endogenous antibody production, and the successful transfer of the human germ-line antibody gene array into such germ-line mutant mice results in the production of human antibodies upon antigen challenge.

Humanized Antibodies

[0106] Antibody humanization techniques generally involve the use of recombinant DNA technology to manipulate the DNA sequence encoding one or more polypeptide chains of an antibody molecule. Accordingly, a humanized form of a non-human antibody (or a fragment thereof) is a chimeric antibody or antibody chain (or a fragment thereof, such as an Fv, Fab, Fab′, or other antigen-binding portion of an antibody) which contains a portion of an antigen binding site from a non-human (donor) antibody integrated into the framework of a human (recipient) antibody.

[0107] To generate a humanized antibody, residues from one or more complementarity determining regions (CDRs) of a recipient (human) antibody molecule are replaced by residues from one or more CDRs of a donor (non-human) antibody molecule that is known to have desired antigen binding characteristics (e.g., a certain level of specificity and affinity for the target antigen). In some instances, Fv framework (FR) residues of the human antibody are replaced by corresponding non-human residues. Humanized antibodies may also contain residues which are found neither in the recipient antibody nor in the imported CDR or framework sequences. Generally, a humanized antibody has one or more amino acid residues introduced into it from a source which is non-human. In practice, humanized antibodies are typically human antibodies in which some CDR residues and possibly some FR residues are substituted by residues from analogous sites in rodent antibodies. Humanized antibodies generally contain at least a portion of an antibody constant region (Fc), typically that of a human antibody (Jones et al., Nature, 321:522-525 (1986), Reichmann et al., Nature, 332:323-327 (1988), and Presta, Curr. Opin. Struct. Biol., 2:593-596 (1992)).

[0108] Methods for humanizing non-human antibodies are well known in the art. For example, humanized antibodies can be generated according to the methods of Winter and co-workers (Jones et al., Nature, 321:522-525 (1986), Riechmann et al., Nature, 332:323-327 (1988), Verhoeyen et al., Science, 239:1534-1536 (1988)), by substituting rodent CDRs or CDR sequences for the corresponding sequences of a human antibody. Methods that can be used to produce humanized antibodies are also described in U.S. Pat. No. 4,816,567 (Cabilly et al.), U.S. Pat. No. 5,565,332 (Hoogenboom et al.), U.S. Pat. No. 5,721,367 (Kay et al.), U.S. Pat. No. 5,837,243 (Deo et al.), U.S. Pat. No. 5,939,598 (Kucherlapati et al.), U.S. Pat. No. 6,130,364 (Jakobovits et al.), and U.S. Pat. No. 6,180,377 (Morgan et al.).

Administration of Antibodies

[0109] Administration of the antibodies can be done as disclosed herein. Nucleic acid approaches for antibody delivery also exist. For example, antibodies that bind and/or neutralize NEDD4L gene product, NEDD4 gene product, or homologs and orthologs, or fragments of the same, can be administered either alone or with one or more adjuvants. Gene product antibodies and antibody fragments of the invention can also be administered to patients or subjects as a nucleic acid preparation (e.g., DNA or RNA) that encodes the antibody or antibody fragment, such that the patient's or subject's own cells take up the nucleic acid and produce and secrete the encoded antibody or antibody fragment. The delivery of the nucleic acid can be by any means, as disclosed herein, for example.

Delivery of the Compositions to Cells

Nucleic Acid Delivery

[0110] There are a number of compositions and methods which can be used to deliver nucleic acids to cells, either in vitro or in vivo. These methods and compositions can largely be broken down into two classes: viral based delivery systems and non-viral based delivery systems. For example, the nucleic acids can be delivered through a number of direct delivery systems such as, electroporation, lipofection, calcium phosphate precipitation, plasmids, viral vectors, viral nucleic acids, phage nucleic acids, phages, cosmids, or via transfer of genetic material in cells or carriers such as cationic liposomes. Appropriate means for transfection, including viral vectors, chemical transfectants, or physico-mechanical methods such as electroporation and direct diffusion of DNA, are described by, for example, Wolff, J. A., et al., Science, 247,1465-1468, (1990); and Wolff, J. A. Nature, 352, 815-818, (1991). Such methods are well known in the art and readily adaptable for use with the compositions and methods described herein. In certain cases, the methods will be modified to specifically function with large DNA molecules. Further, these methods can be used to target certain diseases and cell populations by using the targeting characteristics of the carrier.

[0111] In the methods described herein, which include the administration and uptake of exogenous DNA into the cells of a subject (i.e., gene transduction or transfection), the nucleic acids of the present invention can be in the form of naked DNA or RNA, or the nucleic acids can be in a vector for delivering the nucleic acids to the cells, whereby the encoding DNA or DNA or fragment is under the transcriptional regulation of a promoter or regulatory sequence, as would be well understood by one of ordinary skill in the art as well as enhancers. The vector can be a commercially available preparation, such as an adenovirus vector (Quantum Biotechnologies, Inc. (Laval, Quebec, Canada).

[0112] As one example, vector delivery can be via a viral system, such as a retroviral vector system which can package a recombinant retroviral genome (see e.g., Pastan et al., Proc. Natl. Acad. Sci. U.S.A. 85:4486, 1988; Miller et al., Mol. Cell. Biol. 6:2895, 1986). The recombinant retrovirus can then be used to infect and thereby deliver to the infected cells nucleic acid encoding a broadly neutralizing antibody (or active fragment thereof) of the invention. The exact method of introducing the altered nucleic acid into mammalian cells is, of course, not limited to the use of retroviral vectors. Other techniques are widely available for this procedure including the use of adenoviral vectors (Mitani et al., Hum. Gene Ther. 5:941-948, 1994), adeno-associated viral (AAV) vectors (Goodman et al., Blood 84:1492-1500, 1994), lentiviral vectors (Naidini et al., Science 272:263-267, 1996), pseudotyped retroviral vectors (Agrawal et al., Exper. Hematol. 24:738-747, 1996). Physical transduction techniques can also be used, such as liposome delivery and receptor-mediated and other endocytosis mechanisms (see, for example, Schwartzenberger et al., Blood 87:472-478, 1996). This invention can be used in conjunction with any of these or other commonly used gene transfer methods.

[0113] In addition, the methods described for introducing nucleic acid and/or protein may be used to introduce NEDD4L into cells. Such introduction may be used to treat hypertension or inhibit viral budding. For example, a NEDD4L gene, or fragment thereof, may be introduced into cells. The NEDD4L gene or fragment may be integrated by illegitimate recombination or by homologous recombination. Alternatively, the NEDD4L gene or fragment may be maintained extrachromosomally, for example, as an episome.

[0114] As one example, if the antibody-encoding nucleic acid or some other nucleic acid encoding a protein recognizing the C2 domain of the NEDD4L gene product, NEDD4 gene product, or homologs and orthologs, or fragments of the same, gene product protein or encoding a particular variant of the NEDD4L gene, NEDD4 gene, or homologs and orthologs, or fragments of the same, to be used in the disclosed methods, is delivered to the cells of a subject in an adenovirus vector, the dosage for administration of adenovirus to humans can range from about 10⁷ to 10⁹ plaque forming units (pfu) per injection but can be as high as 10¹² pfu per injection (Crystal, Hum. Gene Ther. 8:985-1001,1997; Alvarez and Curiel, Hum. Gene Ther. 8:597-613,1997). A subject can receive a single injection, or, if additional injections are necessary, they can be repeated at six month intervals (or other appropriate time intervals, as determined by the skilled practitioner) for an indefinite period and/or until the efficacy of the treatment has been established.

[0115] Parenteral administration of the nucleic acid or vector of the present invention, if used, is generally characterized by injection. Injectables can be prepared in conventional forms, either as liquid solutions or suspensions, solid forms suitable for solution of suspension in liquid prior to injection, or as emulsions. Another approach for parenteral administration involves use of a slow release or sustained release system such that a constant dosage is maintained. See, e.g., U.S. Pat. No. 3,610,795, which is incorporated by reference herein. For additional discussion of suitable formulations and various routes of administration of therapeutic compounds, see, e.g., Remington: The Science and Practice of Pharmacy (19th ed.) ed. A. R. Gennaro, Mack Publishing Company, Easton, Pa. 1995.

[0116] Nucleic acids that are delivered to cells which are to be integrated into the host cell genome, typically contain integration sequences. These sequences are often viral related sequences, particularly when viral based systems are used. These viral integration systems can also be incorporated into nucleic acids which are to be delivered using a non-nucleic acid based system of deliver, such as a liposome, so that the nucleic acid contained in the delivery system can become integrated into the host genome.

[0117] Other general techniques for integration into the host genome include, for example, systems designed to promote homologous recombination with the host genome. These systems typically rely on sequence flanking the nucleic acid to be expressed that has enough homology with a target sequence within the host cell genome that recombination between the vector nucleic acid and the target nucleic acid takes place, causing the delivered nucleic acid to be integrated into the host genome. These systems and the methods necessary to promote homologous recombination are known to those of skill in the art.

Non-Nucleic Acid Based Systems

[0118] The disclosed compositions can be delivered to the target cells in a variety of ways. For example, the compositions can be delivered through electroporation, or through lipofection, or through calcium phosphate precipitation. The delivery mechanism chosen will depend in part on the type of cell targeted and whether the delivery is occurring, for example, in vivo or in vitro.

[0119] Thus, the compositions can comprise, in addition to the disclosed compositions or vectors, for example, lipids such as liposomes, such as cationic liposomes (e.g., DOTMA, DOPE, DC-cholesterol) or anionic liposomes. Liposomes can further comprise proteins to facilitate targeting a particular cell, if desired. Administration of a composition comprising a compound and a cationic liposome can be administered to the blood afferent to a target organ or inhaled into the respiratory tract to target cells of the respiratory tract. Regarding liposomes, see, e.g., Brigham et al. Am. J. Resp. Cell. Mol. Biol. 1:95-100 (1989); Felgner et al. Proc. Natl. Acad. Sci. USA 84:7413-7417 (1987); U.S. Pat. No. 4,897,355. Furthermore, the compound can be administered as a component of a microcapsule that can be targeted to specific cell types, such as macrophages, or where the diffusion of the compound or delivery of the compound from the microcapsule is designed for a specific rate or dosage.

[0120] In the methods described above which include the administration and uptake of exogenous DNA into the cells of a subject (i.e., gene transduction or transfection), delivery of the compositions to cells can be via a variety of mechanisms. As one example, delivery can be via a liposome, using commercially available liposome preparations such as LIPOFECTIN, LIPOFECTAMINE (GIBCO-BRL, Inc., Gaithersburg, Md.), SUPERFECT (Qiagen, Inc., Hilden, Germany) and TRANSFECTAM (Promega Biotec, Inc., Madison, Wis.), as well as other liposomes developed according to procedures standard in the art. In addition, the nucleic acid or vector of this invention can be delivered in vivo by electroporation, the technology for which is available from Genetronics, Inc. (San Diego, Calif.) as well as by means of a SONOPORATION machine (ImaRx Pharmaceutical Corp., Tucson, Ariz.).

[0121] The materials may be in solution, suspension (for example, incorporated into microparticles, liposomes, or cells). These may be targeted to a particular cell type via antibodies, receptors, or receptor ligands. The following references are examples of the use of this technology to target specific proteins to tumor tissue (Senter, et al., Bioconjugate Chem., 2:447-451, (1991); Bagshawe, K. D., Br. J Cancer, 60:275-281, (1989); Bagshawe, et al., Br. J. Cancer, 58:700-703, (1988); Senter, et al., Bioconjugate Chem., 4:3-9, (1993); Battelli, et al., Cancer Immunol. Immunother., 35:421-425, (1992); Pietersz and McKenzie, Immunolog. Reviews, 129:57-80, (1992); and Roffler, et al., Biochem. Pharmacol, 42:2062-2065, (1991)). These techniques can be used for a variety of other specific cell types. Vehicles such as “stealth” and other antibody conjugated liposomes (including lipid mediated drug targeting to colonic carcinoma), receptor mediated targeting of DNA through cell specific ligands, lymphocyte directed tumor targeting, and highly specific therapeutic retroviral targeting of murine glioma cells in vivo. The following references are examples of the use of this technology to target specific proteins to tumor tissue (Hughes et al., Cancer Research, 49:6214-6220, (1989); and Litzinger and Huang, Biochemica et Biophysica Acta, 1104:179-187, (1992)). In general, receptors are involved in pathways of endocytosis, either constitutive or ligand induced. These receptors cluster in clathrin-coated pits, enter the cell via clathrin-coated vesicles, pass through an acidified endosome in which the receptors are sorted, and then either recycle to the cell surface, become stored intracellularly, or are degraded in lysosomes. The internalization pathways serve a variety of functions, such as nutrient uptake, removal of activated proteins, clearance of macromolecules, opportunistic entry of viruses and toxins, dissociation and degradation of ligand, and receptor-level regulation. Many receptors follow more than one intracellular pathway, depending on the cell type, receptor concentration, type of ligand, ligand valency, and ligand concentration. Molecular and cellular mechanisms of receptor-mediated endocytosis has been reviewed (Brown and Greene, DNA and Cell Biology 10:6,399-409 (1991)).

[0122] NEDD4L containing a C2 domain is activated by phosphorylation and upon activation serves to target ENaC for receptor mediated endocytosis. Thus, NEDD4L containing a C2 domain serves to down regulate ENaC and decrease sodium absorption.

In vivo/ex vivo

[0123] As described above, the compositions can be administered in a pharmaceutically acceptable carrier and can be delivered to the subjects cells in vivo and/or ex vivo by a variety of mechanisms well known in the art (e.g., uptake of naked DNA, liposome fusion, intramuscular injection of DNA via a gene gun, endocytosis and the like).

[0124] If ex vivo methods are employed, cells or tissues can be removed and maintained outside the body according to standard protocols well known in the art. The compositions can be introduced into the cells via any gene transfer mechanism, such as, for example, calcium phosphate mediated gene delivery, electroporation, microinjection or proteoliposomes. The transduced cells can then be infused (e.g., in a pharmaceutically acceptable carrier) or homotopically transplanted back into the subject per standard methods for the cell or tissue type. Standard methods are known for transplantation or infusion of various cells into a subject.

Expression Systems

[0125] The nucleic acids that are delivered to cells typically contain expression controlling systems. For example, the inserted genes in viral and retroviral systems usually contain promoters, regulatory sequences and/or enhancers to help control the expression of the desired gene product. A promoter is generally a sequence or sequences of DNA that functions when operably linked to the transcription start site. A promoter contains core elements required for basic interaction of RNA polymerase and transcription factors, and may contain upstream elements and response elements.

Viral Promoters and Enhancers

[0126] Preferred promoters controlling transcription from vectors in mammalian host cells may be obtained from various sources, for example, the genomes of viruses such as: polyoma, Simian Virus 40 (SV40), adenovirus, retroviruses, hepatitis-B virus and most preferably cytomegalovirus, or from heterologous mammalian promoters, e.g., beta actin promoter. The early and late promoters of the SV40 virus are conveniently obtained as an SV40 restriction fragment which also contains the SV40 viral origin of replication (Fiers et al., Nature, 273: 113 (1978)). The immediate early promoter of the human cytomegalovirus is conveniently obtained as a HindIII restriction fragment (Greenway, P. J. et al., Gene 18: 355-360 (1982)). Of course, promoters from the host cell or related species also are useful herein.

[0127] Enhancer generally refers to a sequence of DNA that functions at no fixed distance from the transcription start site and can be either 5′ (Laimins, L. et al., Proc. Natl. Acad. Sci. 78: 993 (1981)) or 3′ (Lusky, M. L., et al., Mol. Cell Bio. 3: 1108 (1983)) to the transcription unit. Furthermore, enhancers can be within an intron (Banerji, J. L. et al., Cell 33: 729(1983)) as well as within the coding sequence itself (Osborne, T. F., et al., Mol. Cell Bio. 4: 1293 (1984)). They are usually between 10 and 300 bp in length, and they function in cis. Enhancers function to increase transcription from nearby promoters. Enhancers also often contain response elements that mediate the regulation of transcription. Promoters can also contain response elements that mediate the regulation of transcription either positively (activation) or negatively (repression). Enhancers often determine the regulation of expression of a gene. Many enhancer sequences are now known from mammalian genes (globin, elastase, albumin, -fetoprotein and insulin), typically one will use an enhancer from a eukaryotic cell virus for general expression. For example, the SV40 enhancer on the late side of the replication origin (bp 100-270), the cytomegalovirus early promoter enhancer, the polyoma enhancer on the late side of the replication origin, and adenovirus enhancers may be used.

[0128] The promotor and/or enhancer may be specifically activated either by light or specific chemical events which trigger their function. Systems can be regulated by reagents such as tetracycline and dexamethasone. There are also ways to enhance viral vector gene expression by exposure to irradiation, such as gamma irradiation, or alkylating chemotherapy drugs.

[0129] In certain embodiments the promoter and/or enhancer region can act as a constitutive promoter and/or enhancer to maximize expression of the region of the transcription unit to be transcribed. A preferred promoter of this type is the CMV promoter (650 bases). Other preferred promoters are SV40 promoters, cytomegalovirus (fill length promoter), and retroviral vector LTF. In certain constructs the promoter and/or enhancer region may be present in all eukaryotic cell types, even if it is only expressed in a particular type of cell at a particular time.

[0130] It has been shown that all specific regulatory elements can be cloned and used to construct expression vectors that are selectively expressed in specific cell types such as melanoma cells. The glial fibrillary acetic protein (GFAP) promoter has been used to selectively express genes in cells of glial origin.

[0131] Expression vectors used in eukaryotic host cells (yeast, fungi, insect, plant, animal, human or nucleated cells) may also contain sequences necessary for the termination of transcription which may affect mRNA expression. These regions are transcribed as polyadenylated segments in the untranslated portion of the mRNA encoding tissue factor protein. The 3′ untranslated regions also include transcription termination sites. It is preferred that the transcription unit also contain a polyadenylation region. One benefit of this region is that it increases the likelihood that the transcribed unit will be processed and transported like mRNA. The identification and use of polyadenylation signals in expression constructs is well established. It is preferred that a polyadenylation signals be used in the transgene constructs. In certain transcription units, the polyadenylation region is derived from the SV40 early polyadenylation signal and consists of about 400 bases. It is also preferred that the transcribed units contain other standard sequences alone or in combination with the above sequences to improve expression from, or stability of, the construct.

Markers

[0132] The vectors of the invention can include nucleic acid sequence encoding a marker product. This marker product is used to determine if the gene has been delivered to the cell and may optionally be constructed such that expression of the gene is determined, for example, by constructing the marker and gene as a dicistronic message. Marker genes include, but are not limited to, the E. Coli lacZ gene, which encodes β-galactosidase, and green fluorescent protein.

[0133] In some embodiments the marker may be a selectable marker. Examples of suitable selectable markers for mammalian cells include, but are not limited to, dihydrofolate reductase (DHFR), thymidine kinase, neomycin, neomycin analog G418, hydromycin, and puromycin. When such selectable markers are successfully transferred into a mammalian host cell, the transformed mammalian host cell can survive if placed under selective pressure. There are two widely used distinct categories of selective regimes. The first category is based on a cell's metabolism and the use of a mutant cell line which lacks the ability to grow independent of a supplemented media. Two examples are: CHO DHFR-cells and mouse LTK-cells. These cells lack the ability to grow without the addition of such nutrients as thymidine or hypoxanthine. Because these cells lack certain genes necessary for a complete nucleotide synthesis pathway, they cannot survive unless the missing nucleotides are provided in a supplemented media. An alternative to supplementing the media is to introduce an intact DHFR or TK gene into cells lacking the respective genes, thus altering their growth requirements. Individual cells which were not transformed with the DHFR or TK gene will not be capable of survival in non-supplemented media,

[0134] The second category is dominant selection which refers to a selection scheme used in any cell type and does not require the use of a mutant cell line. These schemes typically use a drug to arrest growth of a host cell. Those cells which have a novel gene would express a protein conveying drug resistance and would survive the selection. Examples of such dominant selection use the drugs neomycin, (Southern P. and Berg, P., J. Molec. Appl. Genet. 1: 327 (1982)), mycophenolic acid, (Mulligan, R. C. and Berg, P. Science 209: 1422 (1980)) or hygromycin, (Sugden, B. et al., Mol. Cell. Biol. 5: 410-413 (1985)). The three examples employ bacterial genes under eukaryotic control to convey resistance to the appropriate drug G418 or neomycin (geneticin), xgpt (mycophenolic acid) or hygromycin, respectively. Others include the neomycin analog G418 and puramycin.

Pharmaceutical Carriers/Delivery of Pharmaceutical Products

[0135] As described herein, the compositions can also be administered in vivo in a pharmaceutically acceptable carrier. By “pharmaceutically acceptable” is meant a material that is not biologically or otherwise undesirable, i.e., the material may be administered to a subject, along with the nucleic acid or vector, without causing any undesirable biological effects or interacting in a deleterious manner with any of the other components of the pharmaceutical composition in which it is contained. The carrier would naturally be selected to minimize any degradation of the active ingredient and to minimize any adverse side effects in the subject, as would be well known to one of skill in the art.

[0136] The compositions may be administered orally, parenterally (e.g., intravenously), by intramuscular injection, by intraperitoneal injection, transdermally, extracorporeally, topically or the like. As used herein, “topical intranasal administration” means delivery of the compositions into the nose and nasal passages through one or both of the nares and can comprise delivery by a spraying mechanism or droplet mechanism, or through aerosolization of the nucleic acid or vector. The latter may be effective when a large number of animals is to be treated simultaneously. Administration of the compositions by inhalant can be through the nose or mouth via delivery by a spraying or droplet mechanism. Delivery can also be directly to any area of the respiratory system (e.g., lungs) via intubation. The compositions may be delivered such that one or more organs, for example, the kidney, are preferentially targeted. Such organ targeting is known to a person of skill in the art and varies with the delivery vehicle. The exact amount of the compositions required will vary from subject to subject, depending on the species, age, weight and general condition of the subject, the severity of the allergic disorder being treated, the particular nucleic acid or vector used, its mode of administration and the like. Thus, it is not possible to specify an exact amount for every composition. However, an appropriate amount can be determined by one of ordinary skill in the art using only routine experimentation given the teachings herein.

[0137] Parenteral administration of the composition, if used, is generally characterized by injection. Injectables can be prepared in conventional forms, either as liquid solutions or suspensions, solid forms suitable for solution of suspension in liquid prior to injection, or as emulsions. A more recently revised approach for parenteral administration involves use of a slow release or sustained release system such that a constant dosage is maintained. See, e.g., U.S. Pat. No. 3,610,795, which is incorporated by reference herein.

Pharmaceutically Acceptable Carriers

[0138] The compositions, including antibodies, can be used therapeutically in combination with a pharmaceutically acceptable carrier.

[0139] Pharmaceutical carriers are known to those skilled in the art. These most typically would be standard carriers for administration of drugs to humans, including solutions such as sterile water, saline, and buffered solutions at physiological pH. The compositions can be administered intramuscularly or subcutaneously. Other compounds will be administered according to standard procedures used by those skilled in the art.

[0140] Pharmaceutical compositions may include carriers, thickeners, diluents, buffers, preservatives, surface active agents and the like in addition to the molecule of choice. Pharmaceutical compositions may also include one or more active ingredients such as antimicrobial agents, anti-inflammatory agents, anesthetics, and the like.

[0141] The pharmaceutical composition may be administered in a number of ways depending on whether local or systemic treatment is desired, and on the area to be treated. Administration may be topically (including ophthalmically, vaginally, rectally, intranasally), orally, by inhalation, or parenterally, for example, by intravenous drip, subcutaneous, intraperitoneal or intramuscular injection. The disclosed antibodies can be administered intravenously, intraperitoneally, intramuscularly, subcutaneously, intracavity, or transdermally.

[0142] Preparations for parenteral administration include sterile aqueous or non-aqueous solutions, suspensions, and emulsions. Examples of non-aqueous solvents are propylene glycol, polyethylene glycol, vegetable oils such as olive oil, and injectable organic esters such as ethyl oleate. Aqueous carriers include water, alcoholic/aqueous solutions, emulsions or suspensions, including saline and buffered media. Parenteral vehicles include sodium chloride solution, Ringer's dextrose, dextrose and sodium chloride, lactated Ringer's, or fixed oils. Intravenous vehicles include fluid and nutrient replenishers, electrolyte replenishers (such as those based on Ringer's dextrose), and the like. Preservatives and other additives may also be present such as, for example, antimicrobials, anti-oxidants, chelating agents, and inert gases and the like.

[0143] Formulations for topical administration may include ointments, lotions, creams, gels, drops, suppositories, sprays, liquids and powders. Conventional pharmaceutical carriers, aqueous, powder or oily bases, thickeners and the like may be necessary or desirable.

[0144] Compositions for oral administration include powders or granules, suspensions or solutions in water or non-aqueous media, capsules, sachets, or tablets. Thickeners, flavorings, diluents, emulsifiers, dispersing aids or binders may be desirable.

[0145] Some of the compositions may potentially be administered as a pharmaceutically acceptable acid- or base-addition salt, formed by reaction with inorganic acids such as hydrochloric acid, hydrobromic acid, perchloric acid, nitric acid, thiocyanic acid, sulfuric acid, and phosphoric acid, and organic acids such as formic acid, acetic acid, propionic acid, glycolic acid, lactic acid, pyruvic acid, oxalic acid, malonic acid, succinic acid, maleic acid, and fumaric acid, or by reaction with an inorganic base such as sodium hydroxide, ammonium hydroxide, potassium hydroxide, and organic bases such as mono-, di-, trialkyl and aryl amines and substituted ethanolamines.

Therapeutic Uses

[0146] The dosage ranges for the administration of the compositions are those large enough to produce the desired effect in which the symptoms disorder are effected. The dosage should not be so large as to cause adverse side effects, such as unwanted cross-reactions, anaphylactic reactions, and the like. Generally, the dosage will vary with the age, condition, sex and extent of the disease in the patient and can be determined by one of skill in the art. The dosage can be adjusted by the individual physician in the event of any counter indications. Dosage can vary, and can be administered in one or more dose administrations daily, for one or several days.

Combinatorial Chemistry

[0147] The disclosed compositions can be used as targets for any combinatorial technique to identify molecules or macromolecular molecules that interact with the disclosed compositions in a desired way. Also disclosed are the compositions that are identified through combinatorial techniques or screening techniques in which the compositions interact with the NEDD4L gene product, NEDD4 gene product, or homologs and ortholog gene products or fragments of the same, such that the compositions specifically recognize the C2 domain, for example, where the compositions were identified using a NEDD4L gene product, NEDD4 gene product, or homologs and ortholog gene product or fragments of the same as targets in a screening or selection protocol.

[0148] It is understood that when using the disclosed compositions in combinatorial techniques or screening methods, molecules, such as macromolecular molecules, will be identified that have particular desired properties such as inhibition or stimulation or the target molecule's function. The molecules identified and isolated when using the disclosed compositions, such as, the NEDD4L gene product, NEDD4 gene product, or homologs and ortholog gene products or fragments of the same are used as targets, or when they are used in competitive inhibition assays are also disclosed. Thus, the products produced using the combinatorial or screening approaches that involve the disclosed compositions are also considered herein disclosed.

[0149] Combinatorial chemistry includes but is not limited to all methods for isolating small molecules or macromolecules that are capable of binding either a small molecule or another macromolecule, typically in an iterative process. Proteins, oligonucleotides, sugars, lipids, steroids and derivatives thereof, are examples of macromolecules. For example, oligonucleotide molecules with a given function, catalytic or ligand-binding, can be isolated from a complex mixture of random oligonucleotides in what has been referred to as “in vitro genetics” (Szostak, TIBS 19:89, 1992). One synthesizes a large pool of molecules bearing random and defined sequences and subjects that complex mixture, for example, approximately 10¹⁵ individual sequences in 100 μg of a 100 nucleotide RNA, to some selection and enrichment process. Through repeated cycles of affinity chromatography and PCR amplification of the molecules bound to the ligand on the column, Ellington and Szostak (1990) estimated that 1 in 10 RNA molecules folded in such a way as to bind a small molecule dyes. DNA molecules with such ligand-binding behavior have been isolated as well (Ellington and Szostak, 1992; Bock et al, 1992). Techniques aimed at similar goals exist for small organic molecules, proteins, antibodies and other macromolecules known to those of skill in the art. Screening sets of molecules for a desired activity whether based on small organic libraries, oligonucleotides, or antibodies is broadly referred to as combinatorial chemistry. Combinatorial techniques are particularly suited for defining binding interactions between molecules and for isolating molecules that have a specific binding activity, often called aptamers when the macromolecules are nucleic acids.

[0150] There are a number of methods for isolating proteins which either have de novo activity or a modified activity. For example, phage display libraries have been used to isolate numerous peptides that interact with a specific target. (See for example, U.S. Pat. Nos. 6,031,071; 5,824,520; 5,596,079; and 5,565,332 which are herein incorporated by reference at least for their material related to phage display and methods relate to combinatorial chemistry.)

[0151] A preferred method for isolating proteins that have a given function is described by Roberts and Szostak (Roberts R. W. and Szostak J. W. Proc. Natl. Acad. Sci. USA, 94(23)12997-302 (1997). This combinatorial chemistry method couples the functional power of proteins and the genetic power of nucleic acids. An RNA molecule is generated in which a puromycin molecule is covalently attached to the 3′-end of the RNA molecule. An in vitro translation of this modified RNA molecule causes the correct protein, encoded by the RNA to be translated. In addition, because of the attachment of the puromycin, a peptdyl acceptor which cannot be extended, the growing peptide chain is attached to the puromycin which is attached to the RNA. Thus, the protein molecule is attached to the genetic material that encodes it. Normal in vitro selection procedures can now be done to isolate functional peptides. Once the selection procedure for peptide function is complete traditional nucleic acid manipulation procedures are performed to amplify the nucleic acid that codes for the selected functional peptides. After amplification of the genetic material, new RNA is transcribed with puromycin at the 3′-end, new peptide is translated and another functional round of selection is performed. Thus, protein selection can be performed in an iterative manner just like nucleic acid selection techniques. The peptide which is translated is controlled by the sequence of the RNA attached to the puromycin. This sequence can be anything from a random sequence engineered for optimum translation (i.e., no stop codons, etc.) or it can be a degenerate sequence of a known RNA molecule to look for improved or altered function of a known peptide. The conditions for nucleic acid amplification and in vitro translation are well known to those of ordinary skill in the art and are preferably performed as in Roberts and Szostak (Roberts R. W. and Szostak J. W. Proc. Natl. Acad. Sci. USA, 94(23)12997-302 (1997)).

[0152] Another preferred method for combinatorial methods designed to isolate peptides is described in Cohen et al. (Cohen B. A., et al., Proc. Natl. Acad. Sci. USA 95(24):14272-7 (1998)). This method utilizes and modifies two-hybrid technology. Yeast two-hybrid systems are useful for the detection and analysis of protein:protein interactions. The two-hybrid system, initially described in the yeast Saccharomyces cerevisiae, is a powerful molecular genetic technique for identifying new molecules or fragments thereof, that specifically interact with the protein of interest (Fields and Song, Nature 340:245-6 (1989)). Cohen et al., modified this technology so that novel interactions between synthetic or engineered peptide sequences which bind a molecule of choice could be identified. The benefit of this type of technology is that the selection is done in an intracellular environment. The method utilizes a library of peptide molecules that attached to a transcription activation domain. A peptide of choice, for example, a portion of NEDD4L gene product, NEDD4 gene product, or homologs and ortholog gene products or fragment of the same is attached to a sequence specific DNA-binding domain of a transcriptional activation protein, such as Gal 4. By performing the two-hybrid technique on this type of system, molecules that interact with the desired fragments of the NEDD4L gene product, NEDD4 gene product, or homologs and ortholog gene products can be identified. The peptide of choice, the bait, may alternatively be fused to the transcription activation domain and the library, the prey, attached to the DNA-binding domain. Alternative screens based on the two-hybrid methodology have been developed and may be used in place of the traditional two-hybrid system. For example, Cdc25p is an essential gene in Saccharomyces cerevisiae and must be targeted to the plasma membrane to function. Therefore, conditional alleles of cdc25 are introduced into the desired strain and the strain propagated under permissive conditions. The assay is generally conducted under non-permissive conditions. The bait, or prey, may be fused to a membrane localization signal, such as a mystrilation site and the prey, or bait, may be fused to Cdc25p lacking the ability to be targeted to the plasma membrane. Protein-protein interaction between the bait and prey will complement the function of Cdc25 and restore viability.

[0153] Using methodology well known to those of skill in the art, in combination with various combinatorial libraries, one can isolate and characterize those small molecules or macromolecules, which bind to or interact with the desired target. The relative binding affinity of these compounds can be compared and optimum compounds identified using competitive binding studies, which are well known to those of skill in the art.

[0154] Techniques for making combinatorial libraries and screening combinatorial libraries to isolate molecules which bind a desired target are well known to those of skill in the art. Representative techniques and methods can be found in but are not limited to U.S. Pat. Nos. 5,084,824, 5,288,514, 5,449,754, 5,506,337, 5,539,083, 5,545,568, 5,556,762, 5,565,324, 5,565,332, 5,573,905, 5,618,825, 5,619,680, 5,627,210, 5,646,285, 5,663,046, 5,670,326, 5,677,195, 5,683,899, 5,688,696, 5,688,997, 5,698,685, 5,712,146, 5,721,099, 5,723,598, 5,741,713, 5,792,431, 5,807,683, 5,807,754, 5,821,130, 5,831,014, 5,834,195, 5,834,318, 5,834,588, 5,840,500, 5,847,150, 5,856,107, 5,856,496, 5,859,190, 5,864,010, 5,874,443, 5,877,214, 5,880,972, 5,886,126, 5,886,127, 5,891,737, 5,916,899, 5,919,955, 5,925,527, 5,939,268, 5,942,387, 5,945,070, 5,948,696, 5,958,702, 5,958,792, 5,962,337, 5,965,719, 5,972,719, 5,976,894, 5,980,704, 5,985,356, 5,999,086, 6,001,579, 6,004,617, 6,008,321, 6,017,768, 6,025,371, 6,030,917, 6,040,193, 6,045,671, 6,045,755, 6,060,596, and 6,061,636.

[0155] Combinatorial libraries can be made from a wide array of molecules using a number of different synthetic techniques. For example, libraries containing fused 2,4-pyrimidinediones (U.S. Pat. No. 6,025,371) dihydrobenzopyrans (U.S. Pat. Nos. 6,017,768 and 5,821,130), amide alcohols (U.S. Pat. No. 5,976,894), hydroxy-amino acid amides (U.S. Pat. No. 5,972,719) carbohydrates (U.S. Pat. No. 5,965,719), 1,4-benzodiazepin-2,5-diones (U.S. Pat. No. 5,962,337), cyclics (U.S. Pat. No. 5,958,792), biaryl amino acid amides (U.S. Pat. No. 5,948,696), thiophenes (U.S. Pat. No. 5,942,387), tricyclic Tetrahydroquinolines (U.S. Pat. No. 5,925,527), benzofurans (U.S. Pat. No. 5,919,955), isoquinolines (U.S. Pat. No. 5,916,899), hydantoin and thiohydantoin (U.S. Pat. No. 5,859,190), indoles (U.S. Pat. No. 5,856,496), imidazol-pyrido-indole and imidazol-pyrido-benzothiophenes (U.S. Pat. No. 5,856,107) substituted 2-methylene-2,3-dihydrothiazoles (U.S. Pat. No. 5,847,150), quinolines (U.S. Pat. No. 5,840,500), PNA (U.S. Pat. No. 5,831,014), containing tags (U.S. Pat. No. 5,721,099), polyketides (U.S. Pat. No. 5,712,146), morpholino-subunits (U.S. Pat. Nos. 5,698,685 and 5,506,337), sulfamides (U.S. Pat. No. 5,618,825), and benzodiazepines (U.S. Pat. No. 5,288,514).

[0156] As used herein combinatorial methods and libraries included traditional screening methods and libraries as well as methods and libraries used in iterative processes.

Computer Assisted Drug Design

[0157] The disclosed compositions can be used as targets for any molecular modeling technique to identify either the structure of the disclosed compositions or to identify potential or actual molecules, such as small molecules, which interact in a desired way with the disclosed compositions.

[0158] It is understood that when using the disclosed compositions in modeling techniques, molecules, such as macromolecular molecules, will be identified that have particular desired properties such as inhibition or stimulation or the target molecule's function. The molecules identified and isolated when using the disclosed compositions are also disclosed. Thus, the products produced using the molecular modeling approaches that involve the disclosed compositions are also considered herein disclosed.

Chips and Micro Arrays

[0159] Disclosed are chips where at least one address is the sequences or part of the sequences set forth in any of the nucleic acid sequences disclosed herein. Also disclosed are chips where at least one address is the sequences or portion of sequences set forth in any of the peptide sequences disclosed herein.

[0160] Also disclosed are chips where at least one address is a variant of the sequences or part of the sequences set forth in any of the nucleic acid sequences disclosed herein. Also disclosed are chips where at least one address is a variant of the sequences or portion of sequences set forth in any of the peptide sequences disclosed herein.

[0161] Disclosed are chips where at least one address is a molecule related to the variant 13 position as disclosed herein. For example, a chip comprising sequence flanking the variant 13 position are disclosed. Also disclosed are chips comprising any of the sequence information set forth in Table 3.

Computer Readable Mediums

[0162] It is understood that the disclosed nucleic acids and proteins can be represented as a sequence consisting of the nucleotides of amino acids. There are a variety of ways to display these sequences, for example, the nucleotide guanosine can be represented by G or g. Likewise the amino acid valine can be represented by Val or V. Those of skill in the art understand how to display and express any nucleic acid or protein sequence in any of the variety of ways that exist, each of which is considered herein disclosed. Specifically contemplated herein is the display of these sequences on computer readable mediums, such as, commercially available floppy disks, tapes, chips, hard drives, compact disks, and video disks, or other computer readable mediums. Also disclosed are the binary code representations of the disclosed sequences. Those of skill in the art understand what computer readable mediums. Thus, computer readable mediums on which the nucleic acids or protein sequences are recorded, stored, or saved.

[0163] Disclosed are computer-readable mediums comprising the sequences and information regarding the sequences set forth herein. Also disclosed are computer-readable mediums comprising the sequences and information regarding the sequences set forth herein.

Kits

[0164] Disclosed herein are kits that are drawn to reagents that can be used in practicing the methods disclosed herein. The kits can include any reagent or combination of reagent discussed herein or that would be understood to be required or beneficial in the practice of the disclosed methods. For example, the kits could include primers to perform the amplification reactions discussed in certain embodiments of the methods, as well as the buffers and enzymes required to use the primers as intended. For example, disclosed is a kit for assessing a subject's risk for acquiring hypertension, comprising primers capable of identifying sequence information at the variant 13 position, as disclosed herein, of a particular subject or DNA sample. Also disclosed are kits containing reagents as discussed herein related to any of the sequences set forth in Table 3.

[0165] Also disclosed are kits containing reagents for assessing the presence, absence or amount of NEDD4L having a C2 domain and/or NEDD4L lacking the C2 domain.

Methods of Making the Compositions

[0166] The compositions disclosed herein and the compositions necessary to perform the disclosed methods can be made using any method known to those of skill in the art for that particular reagent or compound unless otherwise specifically noted.

Nucleic Acid Synthesis

[0167] For example, the nucleic acids, such as, the oligonucleotides to be used as primers can be made using standard chemical synthesis methods or can be produced using enzymatic methods or any other known method. Such methods can range from standard enzymatic digestion followed by nucleotide fragment isolation (see, for example, Sambrook et al., Molecular Cloning: A Laboratory Manual, 2nd Edition (Cold Spring Harbor Laboratory Press, Cold Spring Harbor, N.Y., 1989) Chapters 5, 6) to purely synthetic methods, for example, by the cyanoethyl phosphoramidite method using a Milligen or Beckman System 1 Plus DNA synthesizer (for example, Model 8700 automated synthesizer of Milligen-Biosearch, Burlington, Mass. or ABI Model 380B). Synthetic methods useful for making oligonucleotides are also described by Ikuta et al., Ann. Rev. Biochem. 53:323-356 (1984), (phosphotriester and phosphite-triester methods), and Narang et al., Methods Enzymol., 65:610-620 (1980), (phosphotriester method). Protein nucleic acid molecules can be made using known methods such as those described by Nielsen et al., Bioconjug. Chem. 5:3-7 (1994).

Peptide Synthesis

[0168] One method of producing the disclosed proteins is to link two or more peptides or polypeptides together by protein chemistry techniques. For example, peptides or polypeptides can be chemically synthesized using currently available laboratory equipment using either Fmoc (9-fluorenylmethyloxycarbonyl) or Boc (tert-butyloxycarbonoyl) chemistry. (Applied Biosystems, Inc., Foster City, Calif.). One skilled in the art can readily appreciate that a peptide or polypeptide corresponding to the disclosed proteins, for example, can be synthesized by standard chemical reactions. For example, a peptide or polypeptide can be synthesized and not cleaved from its synthesis resin whereas the other fragment of a peptide or protein can be synthesized and subsequently cleaved from the resin, thereby exposing a terminal group which is functionally blocked on the other fragment. By peptide condensation reactions, these two fragments can be covalently joined via a peptide bond at their carboxyl and amino termini, respectively, to form an antibody, or fragment thereof. (Grant G A (1992) Synthetic Peptides: A User Guide, W. H. Freeman and Co., N.Y. (1992); Bodansky M and Trost B., Ed. (1993) Principles of Peptide Synthesis, Springer-Verlag Inc., NY (which is herein incorporated by reference at least for material related to peptide synthesis).) Alternatively, the peptide or polypeptide is independently synthesized in vivo as described herein. Once isolated, these independent peptides or polypeptides maybe linked to form a peptide or fragment thereof via similar peptide condensation reactions.

[0169] The peptides may also be directly or indirectly linked to other molecules, such as, fluorescent molecules, biotin, enzymes or the like. In addition, one or more peptides maybe labeled by incorporation of radioactive isotopes. For example, peptides may be labeled by methods known in the art for incorporating ¹²⁵I, ¹⁴C or ³H.

[0170] For example, enzymatic ligation of cloned or synthetic peptide segments allow relatively short peptide fragments to be joined to produce larger peptide fragments, polypeptides or whole protein domains (Abrahmsen L. et al., Biochemistry, 30:4151 (1991)). Alternatively, native chemical ligation of synthetic peptides can be utilized to synthetically construct large peptides or polypeptides from shorter peptide fragments. This method consists of a two step chemical reaction (Dawson et al. Synthesis of Proteins by Native Chemical Ligation., Science, 266:776-779 (1994)). The first step is the chemoselective reaction of an unprotected synthetic peptide-thioester with another unprotected peptide segment containing an amino-terminal Cys residue to give a thioester-linked intermediate as the initial covalent product. Without a change in the reaction conditions, this intermediate undergoes spontaneous, rapid intramolecular reaction to form a native peptide bond at the ligation site (Baggiolini M. et al. (1992) FEBS Lett. 307:97-101; Clark-Lewis I et al., J. Biol. Chem., 269:16075 (1994); Clark-Lewis I et al., Biochemistry, 30:3128 (1991); Rajarathnam K et al., Biochemistry 33:6623-30 (1994)).

[0171] Alternatively, unprotected peptide segments are chemically linked where the bond formed between the peptide segments as a result of the chemical ligation is an unnatural (non-peptide) bond (Schnolzer, M et al. Science, 256:221 (1992)). This technique has been used to synthesize analogs of protein domains as well as large amounts of relatively pure proteins with full biological activity (deLisle Milton R C et al., Techniques in Protein Chemistry IV, Academic Press, New York, pp. 257-267 (1992)).

Processes for Making the Compositions

[0172] Disclosed are processes for making the compositions as well as making the intermediates leading to the compositions. For example, disclosed are process for making primers and probes and kits. There are a variety of methods that can be used for making these compositions, such as synthetic chemical methods and standard molecular biology methods. It is understood that the methods of making these and the other disclosed compositions are specifically disclosed.

[0173] Disclosed are cells produced by the process of transforming the cell with any of the disclosed nucleic acids. Disclosed are cells produced by the process of transforming the cell with any of the isolated nucleic acids disclosed herein.

[0174] Disclosed are any of the disclosed peptides produced by the process of expressing any of the disclosed nucleic acids. Disclosed are any of the isolated peptides produced by the process of expressing any of the disclosed nucleic acids.

[0175] Disclosed are animals produced by the process of transfecting a cell within the animal with any of the nucleic acid molecules disclosed herein. Disclosed are animals produced by the process of transfecting a cell within the animal with any of the nucleic acid molecules disclosed herein, wherein the animal is a mammal. Also disclosed are animals produced by the process of transfecting a cell within the animal with any of the nucleic acid molecules disclosed herein, wherein the mammal is mouse, rat, rabbit, cow, sheep, pig, or primate.

[0176] Also disclosed are animals produced by the process of adding to the animal any of the cells disclosed herein.

Methods of Using the Compositions

Methods of Using the Compositions as Research Tools

[0177] The disclosed compositions can be used in a variety of ways as research tools. For example, the disclosed compositions, can be used to study the interactions between NEDD4L gene product, NEDD4 gene product, or homologs and ortholog gene products and, for example, ENaC.

[0178] The compositions can be used, for example, as targets in combinatorial chemistry protocols or other screening protocols to isolate molecules that possess desired functional properties related to, for example, the C2 domain, and molecules which can be used to identify variants of the NEDD4L gene product, NEDD4 gene product, or homologs and ortholog gene products.

[0179] The disclosed compositions can be used as discussed herein as either reagents in micro arrays or as reagents to probe or analyze existing microarrays. The disclosed compositions can be used in any known method for isolating or identifying single nucleotide polymorphisms. The compositions can also be used in any method for determining allelic analysis of, for example, the NEDD4L gene, NEDD4 gene, or homologs and orthologs, or fragments of the same, particularly allelic analysis as it relates to the variant 13 position of the NEDD4L gene or those positions identified Table 3. The compositions can also be used in any known method of screening assays, related to chip/micro arrays. The compositions can also be used in any known way of using the computer readable embodiments of the disclosed compositions, for example, to study relatedness or to perform molecular modeling analysis related to the disclosed compositions.

Methods of Diagnosing or Predicting Hypertension

[0180] The disclosed compositions can also be used as diagnostic tools related to diseases, such as, hypertension and viral infectivity. Disclosed are methods of determining a subject's risk for acquiring hypertension, comprising assaying whether the subject has an A or G at the variant 13 position of the NEDD4L gene. Also disclosed are methods of determining a subject's risk for acquiring hypertension, comprising assaying whether the subject has any of the variations set forth in Table 3.

[0181] The steps of assaying subjects or DNA samples for the variations of the NEDD4L gene, NEDD4 gene, or homologs and orthologs, or fragments of the same, discussed herein, would include, but are not limited to, collecting the nucleic acid sample, such as DNA, by, for example, collecting cells from a subject and isolating the desired nucleic acid in any way desired. The disclosed methods could also include steps, such as amplifying the nucleic acid, separating the nucleic acid, purifying the nucleic acid, categorizing the nucleic acid in any way desired. The disclosed methods could also include hybridization steps using, for example, chip technology. Typically the method will also include a step of identifying the sequence or variation present in the sample nucleic acid related to, for example, variant 13 of NEDD4L or any of the variants discussed in Table 3. The variants of Table 3 all show linkage to other variants disclosed in Table 3, therefore, information regarding one variant correlates with the presence of other variants. The method may also include steps related to the analysis and quantitation of the information obtained from the analysis of the sample. This type of analysis can be performed by, for example, computers.

Methods of Gene Modification and Gene Disruption

[0182] The disclosed compositions and methods can be used for targeted gene disruption and modification in any animal that can undergo these events. Gene modification and gene disruption refer to the methods, techniques, and compositions that surround the selective removal or alteration of a gene or stretch of chromosome in an animal, such as a mammal, in a way that propagates the modification in the target cells and optionally through the germ line of the mammal. In general, a cell is transformed with a vector which is designed to homologously recombine with a region of a particular chromosome contained within the cell, as, for example, described herein. This homologous recombination event can produce a chromosome which has exogenous DNA introduced, for example, in frame, with the surrounding DNA. This type of protocol allows for very specific mutations, such as point mutations, to be introduced into the genome contained within the cell. Methods for performing this type of homologous recombination are disclosed herein.

[0183] One of the preferred characteristics of performing homologous recombination in mammalian cells is that the cells should be able to be cultured, because the desired recombination event occurs at a low frequency.

[0184] Once the cell is produced through the methods described herein, an animal can be produced from this cell through either stem cell technology or cloning technology. For example, if the cell into which the nucleic acid was transfected was a stem cell for the organism, then this cell, after transfection and culturing, can be used to produce an organism which will contain the gene modification or disruption in germ line cells, which can then in turn be used to produce another animal that possesses the gene modification or disruption in all of its cells. In other methods for production of an animal containing the gene modification or disruption in all of its cells, cloning technologies can be used. These technologies generally take the nucleus of the transfected cell and either through fusion or replacement fuse the transfected nucleus with an oocyte which can then be manipulated to produce an animal. The advantage of procedures that use cloning instead of ES technology is that cells other than ES cells can be transfected. For example, a fibroblast cell, which is very easy to culture can be used as the cell which is transfected and has a gene modification or disruption event take place, and then cells derived from this cell can be used to clone a whole animal. Where a clonal animal is to be produced, the animal may be any animal other than a human, such as, a mouse, rat, rabbit, primate or the like.

[0185] Disclosed, for example, would be animals having a gene disruption event, taking place at, for example, the variant 13 position, or the positions identified in Table 3, for the purpose of creating, for example, an animal model system for the study of hypertension or for testing drugs against hypertension.

Methods of Treating

[0186] Disclosed are compositions and methods for treating hypertension. Disclosed is the relationship between the C2 domain of NEDD4L and NEDD4L homologs and orthologs, or fragments of the same, and the Na transport enzyme ENaC. It is found that promoting this interaction can reduce hypertension.

[0187] Also disclosed are compositions and methods for preventing viral budding. Disclosed is the relationship between the C2 domain of NEDD4L and NEDD4L homologs and orthologs, or fragments of the same, and the viral building machinery. It is found that promoting this interaction can reduce viral budding.

### EXAMPLES

[0188] The following examples are put forth so as to provide those of ordinary skill in the art with a complete disclosure and description of how the compounds, compositions, articles, devices and/or methods claimed herein are made and evaluated, and are intended to be purely exemplary of the invention and are not intended to limit the scope of what the inventors regard as their invention. Efforts have been made to ensure accuracy with respect to numbers (e.g., amounts, temperature, etc.), but some errors and deviations should be accounted for. Unless indicated otherwise, parts are parts by weight, temperature is in ° C. or is at ambient temperature, and pressure is at or near atmospheric.

### Example 1

### Material and Methods

Sequence Analysis

[0189] Genomic, cDNA and EST databases included GenBank nr, Human and Mouse EST entries, the human genome draft assembly hg8 06 Aug. 2001 freeze (http://genome.ucsc.edu), the mouse phusion and arachne draft assembly (http://mouse.ensembl.org) and the Fugu rubripes draft genome assembly 1 (http://wwwjgi.doe.gov/fugu/index.html). Results from BLAST and cross-match analysis were parsed with Perl scripts that iterated the sequence search to form a consistent assembly of EST, cDNA and genomic sequence. Inclusion of EST and cDNA sequence into the assembly required at least one confirmed splice junction on genomic DNA. All genomic coordinates are referenced to the chromosome 18 draft assembly hg8 06 Aug. 2001 freeze or contig NT_{—}033907, gi=27485382. The coordinates reported in relation to chromosome 18 draft assembly hg8 06 Aug. 2001 freeze are indexed to base 65,000,000 in that assembly.

Genomic DNA used for Polymorphism Analysis

[0190] Hypertensive sibpairs and normotensive controls for the investigation of genetic linkage to a wide variety of phenotypes (Williams et al. 2000). DNA samples were selected from 50 normotensive controls for this survey of common polymorphism. DNA samples were selected from over 430 hypertensive patients and surveyed for the polymorphisms shown in Table 3. All participants were hypertensive (systolic blood pressure≧140 mm Hg, diastolic blood pressure≧90 mm Hg, or on antihypertensive medications) with diagnosis before age 60.

Search for Polymorphism by Resequencing

[0191] PCR amplification was carried out in 50 μl reaction volumes using Expand Long Template PCR System (Roche); see supplementary data for primer sequences. Each reaction contained 100 ng of genomic DNA, 350 μM dNTPs, 0.2 μM of each PCR primer, 1× reaction buffer #2 and 2.6 units of Taq/Pwo polymerase mix. Cycling conditions included an initial denaturation at 94° C. for 2 min., 10 cycles of 94° C. for 10 sec., 55° C. for 10 sec., 68° C. for 2 min.; followed by 20 cycles of 94° C. for 10 sec., 55° C. for 10 sec., 68° C. for 2 min.+20 sec./cycle. Residual primers and dNTPs were removed from PCR products with a Millipore glass fiber filter. The sequence-ready templates were eluted in 70 μl of sterile H₂O. 5 μl of each template was aliquoted to a 384-well sequence dish and evaporated to dryness in a speed-vac.

[0192] Cycle sequencing was carried out in 2 μl reaction volumes using ABI BigDye Terminator v.3.0 chemistry. Cyc° C. for 10 sec., 50° C. for 5 sec., 60° C. for 4 min. Upon completion of cycle sequencing, ling conditions included an initial denaturation at 96° C. for 30 sec.; followed by 45 cycles of 96 8 μl of 62.5% EtOH/1M KOAc pH4.5 was added to each reaction and the sequence plates were centrifuged at 4000 rpm at 4° C. for 45 min. The samples were resuspended in 10 μl of formamide and electrophoresed on an ABI 3700 DNA analyzer prepared with POP-5 capillary gel matrix. Sequence trace files were evaluated using the Phred, Phrap and Consed programs (Ewing et al. 1998). Potential heterozygotes were identified by using the PolyPhred version 3.5 program (Nickerson et al. 1997). Polymorphisms were verified by manual evaluation of the individual sequence traces.

Reverse Transcription-PCR (RT-PCR) and Rapid Amplification of cDNA Ends (RACE)

[0193] 5′ RACE reactions were performed with the SMART II RACE cDNA amplification kit (Clontech, USA) according to the manufacturer's protocol. Total RNA was purchased from Clontech (Catalog #: 64096-1, 64097-1) and Stratagene (Catalog #: 735014, 735474). First strand cDNA synthesis was performed with PowerScript reverse transcriptase (Clontech, USA) on 1 μg of total RNA using the 5′ RACE CDS primer and the addition of SMART II A oligonucleotide (Clontech, USA). Following reverse transcription, the first-strand cDNA is used directly in 5′ RACE or RT-PCR reactions. Gene specific PCR products were obtained by using a nested PCR strategy (see supplemental data for primer sequences). Products were sub-cloned into pCR2.1 with the TA Cloning Kit (Invitrogen, USA). Standard plasmid sequencing procedures were performed on the sub-clones and RT-PCR templates were also sequenced directly.

Quantitative Analysis of mRNA

[0194] Human kidney, adrenal gland and liver mRNA, purchased from Clontech, were used for quantitative analysis of mRNA. First-strand cDNA for 1 μg total RNA was prepared using reverse transcriptase (Power Script Reverse Transcriptase, Clontech) using the manufacturer's standard protocol. Quantitative real-time polymerase chain reaction (Q-PCR) was performed by monitoring the fluorescence of SYBR Green (Molecular Probes) with the ABI PRISM 7700 sequence detection system (Applied Biosystems). Oligonucleotide primers were designed to span at least 1 intron and to minimize primer-dimer formation. PCR reaction products were electrophoresed to verify specific amplification and the absence of primer-dimer formation. All PCR reactions were performed in triplicate with primers specific for the corresponding human genes and spanning at least 1 intron: 5′ cct aaa tga gac gtc tcg cat ttg ag 3′ (human N4L Ex1 up), 5′ agc tgg cgg aga cca gga ttt 3′ (human NEDD44L Ex2a UP), 5′ ccg cta cgt aca atg aaa gtt tca c 3′(human NEDD4L Ex3 RP), 5′gaa ggt gaa ggt cgg agt c 3′ (human glyceraldehyde-3-phosphate dehydrogenase (hGAPDH) UP), 5′ gaa gat ggt gat ggg att tc 3′ (human GAPDH RP). Amplification was performed during 35 cycles of 94° C. for 10 seconds, 60° C. for 10 seconds, and 72° C. for 20 seconds. Water and genomic DNA served as negative controls. Cloned human cDNAs were used to generate standard curves. Expression of both Ex1-Ex3 isoform and Ex2a-Ex3isoform was expressed relative to hGAPDH expression.

### Example 2

### Results

Polymorphism Discovery in NEDD4L

[0195] Common variants of human NEDD4L were discovered by sequencing PCR products spanning exons 1, 2, 2a and 3 through 31 from 48 individuals. Exons 1 and 2 were defined from EST sequences (BF965237 (SEQ ID NO:152) and BF678906 (SEQ ID NO:153)) and TBLASTN analysis of genomic sequence. Exon 2a corresponds to the splice form typified by KIAA0439 (GenBank accession no. ABO07899 (SEQ ID NO: 154)). The location of NEDD4L exon junctions and the target coordinates for resequencing are in Table 3. 5,524 nucleotides in exons and 23,108 nucleotides overall were surveyed for polymorphisms by resequencing. Table 3 shows the position, alleles, allele frequency and functional implication of the 34 single nucleotide and 4 insertion/deletion polymorphisms detected. One polymorphism, variant 13 at nucleotide 82,723, occurred at the last nucleotide of exon 1 and is common in Caucasians (70% G, 30% A.). This variant has the potential to disrupt exon 1 splicing since G is the most common nucleotide at this position in consensus 5′ splice donor sites (Stephens and Schneider 1992). Variants in this position are known to alter splice site selection in numerous human mutations (Nakai and Sakamoto 1994; Rogan et al. 1998). Splice site selection at exon 1 was evaluated in human kidney and adrenal RNA.

Transcript Analysis by RT-PCR, RACE and Q-PCR

[0196] RT-PCR was performed with exon 1 and exon 3 specific primers. Two sources of RNA from each tissue were used: kidney 1=normal, whole kidneys pooled from 6 male/female Caucasians, kidney 2=2 female donors, adrenal 1=normal, whole adrenal glands pooled from 62 male/female Caucasians, adrenal 2=single female. Direct sequencing of the RT-PCR products from kidney RNA displayed mixed sequence at the exon 1-2 junction, so the products were sub-cloned into a plasmid vector, and independent transformants were sequenced. FIG. 1 shows that two distinct splice junctions are found: splice product 1 generates an intact predicted reading frame between exon 1 and 2, while splice product 2, generated by splicing 10 nts. distal of splice product 1, results in a transcript that disrupts the predicted reading frame. The G variant shows leaky splice site selection with a mixture of splice product 1 (35/51 in kidney, 11/20 in adrenal) and splice product 2 (16/51 in kidney, 9/20 in adrenal), while the A variant shows only splice product 2 (87/87 in kidney and adrenal).

[0197] Further characterization of the representation and semi-quantitative abundance of 5′ splice isoforms were performed with 5′ RACE reactions with primers specific for exons 2, 2a, 2c and 3, using the same 4 RNA preparations used in the RT-PCR experiment. RACE products were sub-cloned into a plasmid vector and 96 clones were sequenced for each RACE reaction. FIG. 2 shows the exon structure of the RACE products and the number of unique 5′ ends seen with each primer. Using primers within exon 2, approximately 50% of the sub-cloned RACE products from kidney and adrenal showed splicing to exon 1. The other products were located in exon 2 or spliced to unrepresented genomic sequence. Race experiments with both exon 2a and 2c primers resulted in no detectable 5′ sequence spliced to these exons, implying that these exons may be adjacent to promoters expressed in these tissues. RACE experiments with exon 3 primers confined the presence of the exon 1-exon 2-exon 3 (isoform I) transcript, and the exon 2a-3 (isoform II) transcript. These experiments also revealed two distinct exons expressed in kidney: 2b and 2d, with 2b represented as a 5′ exon without an in-frame AUG codon spliced to exon 3, similar to exon 2a and 2c, and exon 2d detected as an alternative splice form consisting of exon 2a-2d-3, each with consensus splice sequences at their 5′ donor and 3′ acceptor sites. The exon 1-2 splice junction for RACE clones containing the G variant were either splice product 1 or 2, and only splice product 2 was seen when the A variant was present, similar to the RT-PCR analysis.

[0198] The relative level and tissue specific expression of the exon 1-2-3 isoform I versus the exon 2a-3 isoform III was analyzed by Q-PCR. FIG. 3 shows the results of 4 experiments, each in triplicate, for the quantitative analysis of NEDD4L mRNA from kidney, adrenal gland and liver, normalized to the expression of human GAPDH in each tissue. Expression of GAPDH in these tissues is not significantly different (data not shown). Expression of isoform I is significantly higher in both kidney and adrenal than isoform III. These findings suggest that isoform I (exon 1-2-3) is expressed in a tissue-specific manner, and that is more abundant than isoform III (exon 2a-3) in kidney and adrenal gland.

Definition of NEDD4L Genomic Structure and Transcript Isoform Pattern

[0199] FIG. 3A combines cDNA, EST, RT-PCR and RACE data and suggests 6 different transcript isoforms spliced to exon 3. Isoforms I and II splice an in-frame AUG codon to exon 2 adding 8 and 16 amino acids, respectively. Isoform I spans 303 kb of genomic DNA (draft sequence with 54 gaps) and consists of 30 exons. Both isoforms are capable of producing a translated protein now containing an evolutionarily conserved N-terminal C2 domain beginning in exon 2. The similarity of this C2 domain to consensus SMART C2 domain sequence (Schultz et al. 2000) is shown in FIG. 3B, as well as the location of this domain across exons 2 through exon 6 of NEDD4L. The sequence 5′ of the exon 2 splice junction in isoform II is not represented in the current version of the draft human genome sequence, and we postulate it may reside 5′ of exon 1, in an unfinished region of chromosome 18. This isoform was not detected in the 5′ RACE analysis, but is detected by RT-PCR from both kidney and adrenal RNA (data not shown).

[0200] Isoforms III and IV splice exons 2a and 2c to exon 3, respectively. Most functional studies of human NEDD4L protein have used the exon 2a-3 isoform typified by KIAA0439 (GenBank accession no. ABO07899 (SEQ ID NO:154)), which lacks an intact N-terminal C2 domain. Neither of these exons contain AUG codons in any frame, and the first AUG start codon in these isoforms occurs in exon 7, thus producing a form of NEDD4L protein completely lacking the C2 domain. Isoforms V (exon 2a-2d-3) and VI (exon 2d-3) also lack AUG start codons and are predicted to initiate translation in exon 7.

[0201] Analysis of mouse cDNA, EST and draft genomic assemblies reveals conserved exon-intron junctions for exons 2, 2a, 2b, 2c and 3. Mouse exon 2a-3 splice form is represented by the following ESTs: AW106584 (SEQ ID NO:155), BI687556 (SEQ ID NO: 156), BB621848 (SEQ ID NO:157), AW228518 (SEQ ID NO:158), BI218843 (SEQ ID NO:159), AW226920 (SEQ ID NO: 160), BB846219 (SEQ ID NO: 161), AI527754 (SEQ ID NO: 162), AI227149 (SEQ ID NO: 163), AI931594 (SEQ ID NO:164), AW910412 (SEQ ID NO:165), BI690367 (SEQ ID NO:166), BG971715 (SEQ ID NO: 167), BI650832 (SEQ ID NO: 168), BI559036 (SEQ ID NO: 169). Mouse exon 2b-3 splice isoform is represented by cDNA AKO04969 (SEQ ID NO: 170), and mouse exon 2c splice isoform is represented by ESTs: BG404747 (SEQ ID NO:171) and BG294676 (SEQ ID NO: 172). The mouse exon 2-3 splice form is represented by ESTs: BB569841 (SEQ ID NO: 173), BB611456 (SEQ ID NO:174), BB635343 (SEQ ID NO:175), BB639757 (SEQ ID NO:176), BB640919 (SEQ ID NO: 177), BB847602 (SEQ ID NO: 178), BB863379 (SEQ ID NO: 179). These seven ESTs form 5 sequence clusters, and two of these clusters match draft assemblies with a consensus GT dinucleotide at the predicted 5″ splice donor site. None of these clusters display significant similarity to human exon 1, although BB863379 (SEQ ID NO: 179) does have 71 nts. 5′ of exon 2 that matches the 5′ end of human isoform II at 89% identity. However this EST is only 96% identical to the other mouse exon 2-3 ESTs, thus it is likely that this EST represents a pseudogene.

[0202] TBLASTN analysis of isoform I and II against the draft Fugu rubripes (puffer fish) genome revealed a draft assembly (Scaffold_{—}826, 55 kb with 9 gaps) spanning 26 kb containing exons 2 through 30 (exons 10, 11, 12 are missing from the assembly) and displaying conserved exon-intron junctions for the 26 exons detected. Translation of the fugu NEDD4L exons yields a protein that is 87% identical and 94% similar to human NEDD4L isoform II. FIG. 3B shows that there are no amino acid substitutions between the C2 domain of human and mouse NEDD4L, and that there are fewer substitutions between xenopus, fugu, chicken, mouse and human NEDD4L than between human NEDD4L and NEDD4. The fugu NEDD4L gene also contains an exon 1.2 kb upstream of exon 2 that is predicted to splice an in-frame AUG codon to exon 2 with the addition of 15 N-terminal amino acids. That translated product displays detectable sequence similarity with the translated product of isoform II (FIG. 3B), which is the isoform whose sequence 5′ of exon 2 is missing in current human finished and draft sequence databases. Although orthologous 2a, 2b and 2c exons are detected in the mouse draft sequence, there is no detectable similarity in fugu NEDD4L intron 2 using either TBLASTN or BLASTN analysis. This suggests that isoform II may reflect the most ancestral form of NEDD4L and that the sequence of the N-terminal C2 domain has been conserved by natural selection.

[0203] The survey of NEDD4L exons and flanking introns for polymorphic variants in 48 Caucasian individuals detected 35 flanking/intronic variants, and 3 exonic variants. The survey of NEDD4L exons and flanking introns in over 430 patients diagnosed with hypertension, confirming the survey results in Caucasians. Variant 13-A occurs at an allele frequency of 0.30, and its location in exon 1 results in a synonymous CAG/A glutamine codon substitution, but also a change from the most common 5′ splice donor consensus to weaker consensus: CAG-GT to CAA-GT. Analysis of the exon 1-2 splice junction from RT-PCR and RACE products from human and adrenal RNA reveals leaky splice site selection, of which only one form is predicted to lead to in-frame translation of an evolutionarily conserved N-terminal C2 domain. The identity of variant 13 changes the ratio of splice site selection from preferred splicing of the in-frame product with the G variant, to no detectable splicing of the in-frame product with the A variant.

[0204] RT-PCR and RACE analysis from human and adrenal RNA revealed six transcript isoforms. Most functional studies of NEDD4L protein have used a spliced form of the human NEDD4L protein typified by KIAA0439 (GenBank accession no. AB007899 (SEQ ID NO: 154)), which corresponds to isoform III resulting from exon 2a-3 splicing and lacking an intact N-terminal C2 domain. This is in contrast to the founding, and defining, member of the NEDD4L family, a Xenopus laevis Nedd4-like protein that does contain a C2 domain (Rebhun and Pratt 1998). The analysis disclosed herein of genomic, cDNA and EST sequence reveals a conserved exon 2 in fugu, mouse and human that correspond to the orthologous sequence in xenopus. The RACE analysis using exon 2 and exon 3 primers demonstrates that isoform I of human NEDD4L is an abundant 5′ transcript isoform in adrenal tissue, while in kidney there is evidence for multiple isoforms including I, III, V and VI. Isoforms III through VI all generate transcripts where the first potential AUG start codon is in exon 7, distal to the C2 domain. RACE experiments from exon 2a and 2c did not detect any sequence spliced 5′ of these exons, and exon 1-3 RT-PCR revealed only exon 1-2-3 splice forms, with no splicing detected to exons 2a, 2b, 2c or 2d. Therefore, these isoforms are expected to result in translation from the AUG codon in exon 7. This methionine codon is conserved between human, mouse, chicken, xenopus and fugu, and as shown in FIG. 3B, it is located at the C-terminal junction of the C2 domain.

[0205] The observed average amino acid identity observed in large-scale comparisons of orthologous mouse and human protein sequences is 85.4% (Makalowski et al. 1996). The translated 101 amino acid C2 domain of human and mouse NEDD4L are 100% identical, 98.0% identical to chicken C2, 96.0% identical to xenopus C2, and 94.1% identical to fugu C2 domains. This level of sequence conservation suggests that the C2 domain is functional and under strong selective constraints. The existence of multiple isoforms that result in either C2 or C2-less forms of NEDD4L protein suggests that these two forms may have different functional roles in ubiquitination and endocytosis of protein targets such as ENaC.

[0206] Although no experiments have yet been reported with a human or mouse NEDD4L protein containing an intact C2 domain from either isoform I or II, there are several studies using C2-less NEDD4L and Nedd4/Rsp5 proteins in mammalian, amphibian and yeast systems. The approximately 110 amino acid C2 domain is a eukaryotic protein module that has Ca²⁺ dependent interactions with phospholipids, inositol polyphosphates and intracellular proteins. The human Nedd4 C2 domain has been shown to cause Ca²⁺ dependent plasma membrane localization in polarized Madin-Darby canine kidney cells (Plant et al. 1997). This localization of endogenous Nedd4 was preferably to apical and lateral membranes in these polarized cells, and heterologous expression of a C2 deletion construct showed no evidence of Ca²⁺ dependent membrane localization.

[0207] Further studies have shown that annexin XIlla and b is the protein-binding partner of Nedd4 in this Ca²⁺ dependent membrane localization assay (Plant et al. 2000). The Ca²⁺ dependent binding to annexin Xlllb further targets the complex to lipid rafts, which are membrane cholesterol and sphingolipid microdomains involved in endocytosis (Ikonen 2001).

[0208] Several experiments have investigated the effect of the Nedd4 C2 domain on regulation of ENaC activity. In both Xenopus oocytes and rat thyroid epithelia, removal of the Nedd4 C2 domain in expression constructs caused a stronger down-regulation of ENaC activity (Snyder et al. 2001). This result has also been seen in a comparison of human NEDD4 and NEDD4L in down-regulating ENaC activity in Xenopus oocytes (Kamynina et al. 2001a; Kamynina et al. 2001b). In this case, removal of Nedd4 C2 domain also resulted in stronger down-regulation of ENaC activity, and expression of an isoform III construct of NEDD4L (KIAA0439, SEQ ID NO: 154) displayed more potent inhibitor of ENaC than NEDD4 constructs.

[0209] Experiments with the RSP5 yeast homolog of the NEDD4/NEDD4L family have demonstrated that it is involved in the ubiquitination and endocytosis of several membrane proteins. C2 less constructs of Rsp5 had no effect on the ubiquitination and internalization of the yeast alpha-factor receptor. However, the C2 less construct displayed defects in transport of fluid-phase markers through the endocytotic pathway to the vacuole, suggesting that the C2 domain may have functions post-endocytosis suggesting that Nedd4 proteins are internalized along with their ubiquitinated protein targets (Dunn and Hicke 2001). This study also provided evidence that Rsp5 protein forms homomeric complexes, both in vitro and in vivo.

[0210] Recent evidence suggests that Nedd4 family proteins interact with coat proteins of enveloped viruses late in the process of viral budding (Vogt 2000; Hicke 2001). Using the late assembly domain of Rous sarcoma virus (RSV) Gag protein as a peptide probe on a chicken embryo expression library has recently resulted in the cloning of the C2 and WW domains of the chicken NEDD4L ortholog (Kikonyogo et al. 2001). In a human cell assay of RSV Gag budding, over-expression of the chicken NEDD4L WW domains resulted in dominant-negative inhibition of Gag budding, suggesting the over-expressed chicken NEDD4L WW domains inhibited Gag budding by competing with endogenous human NEDD4L. It has also been shown that the PY domain of ENaC can substitute for the RSV Gag late assembly domain in a virus-like particle assay in HeLa cells (Strack et al. 2000) implicating NEDD4L function in the budding of enveloped viruses containing PY motifs which include retroviruses.

[0211] In summary, a common variant in NEDD4L has been shown to affect splice site selection in a major transcript isoform expressed in kidney and adrenal gland. The variety of transcripts detected in human and mouse leading to either inclusion or exclusion of the C2 domain suggest that expression of different isoforms may lead to functional differences. Indeed, presence of the C2 domain, by targeting such isoforms to cell membranes, may contribute to substrate specificity and the proposed interactions with ENaC. Individuals homozygous for the A allele variant are predicted to have a decrease in the amount of C2 domain NEDD4L produced from expression of isoform I. The common frequency of this allele suggests that any functional effect will be subtle, as small effects are expected for common variants in common disease. Variant 13 of NEDD4L is therefore a likely candidate single nucleotide polymorphism for association with phenotypes relevant for hypertension and enveloped viral infections. The variant a given subject has can direct the type of therapy to provide. Homozygous individuals for the A variant at position 13 will benefit from sodium restriction and will best respond to drugs that reduce plasma volume, such as diuretics (for example, furosemide, bumetanide or ethacrynic acid), than to drugs that act primarily as vasodilators, such as beta blockers. Tables:

TABLE 3
SNP discovery in human NEDD4L exons and intron flanks.

| Coordinate* | | Coordinate** | Implication | Alleles | Frequency |
|---|---|---|---|---|---|
| variant 1 | 80950 | 825234 | 5′ flank | T/C | 0.16 |
| variant 2 | 80986 | 825270 | 5′ flank | C/G | 0.01 |
| variant 3 | 81117 | 825401 | 5′ flank | C/A | 0.47 |
| variant 4 | 81144 | 825428 | 5′ flank | G/A | 0.27 |
| variant 5 | 81189 | 825473 | 5′ flank | A/G | 0.22 |
| variant 6 | 81479 | 825765 | 5′flank | C/— | 0.47 |
| variant 7 | 81543 | 825828 | 5′ flank | C/T | 0.32 |
| variant 8 | 81756 | 826041 | 5′ flank | G/A | 0.49 |
| variant 9 | 82261 | 826546 | 5′ flank | G/A | 0.31 |
| variant 10 | 82369 | 826654 | 5′ flank | A/G | 0.21 |
| variant 11 | 82541 | 826826 | 5′ flank | G/A | 0.01 |
| variant 12 | 82578 | 826863 | 5′ flank | G/A | 0.01 |
| variant 13 | 82723 | 827008 | splice | G/A | 0.30 |
| | | | junction | | |
| variant 14 | 98767 | 843055 | intron 1 | A/G | 0.01 |
| variant 15 | 98830 | 843118 | intron 1 | C/T | 0.50 |
| variant 16 | 142069 | 871027 | intron 2 | G/A | 0.01 |
| variant 17 | 142182 | 871140 | intron 2 | C/T | 0.01 |
| variant 18 | 142210 | 871168 | intron 2 | A/C | 0.24 |
| variant 19 | 143720 | 872678 | exon2a | C/T | 0.01 |
| variant 20 | 143784 | 872742 | exon2a | G/A | 0.22 |
| variant 21 | 238195 | 925859 | intron 3 | C/G | 0.06 |
| variant 22 | 305555 | 993220 | intron 6 | T/C | 0.44 |
| variant 23 | 035589 | 993254 | intron 6 | A/G | 0.19 |
| variant 24 | 318797 | 1006462 | intron 10 | C/T | 0.38 |
| variant 25 | 320155 | 1007820 | intron 10 | TTCT/— | 0.22 |
| variant 26 | 330373 | 1018038 | intron 13 | G/A | 0.42 |
| variant 27 | 331039 | 1018704 | intron 14 | T/C | 0.01 |
| variant 28 | 331053 | 1018718 | intron 14 | GTT/— | 0.24 |
| variant 29 | 339121 | 1026786 | intron 17 | A/C | 0.01 |
| variant 30 | 359469 | 1047134 | intron 22 | G/A | 0.02 |
| variant 31 | 359494 | 1047159 | intron 22 | G/A | 0.22 |
| variant 32 | 359713 | 1047378 | intron 22 | T/C | 0.17 |
| variant 33 | 360074 | 1047739 | intron 23 | A/G | 0.21 |
| variant 34 | 362468 | 1050133 | intron 23 | TTAAA/— | 0.41 |
| variant 35 | 362874 | 1050539 | intron 24 | C/T | 0.04 |
| variant 36 | 375143 | 1062808 | intron 26 | G/C | 0.01 |
| variant 37 | 378727 | 1066392 | intron 28 | G/A | 0.01 |
| variant 38 | 386046 | 1073711 | 3′ UTR | T/C | 0.05 |

*Coordinates are from the human genome draft assembly hg8 06 Aug. 2001 freeze. The table coordinates can be indexed to chromosome 18 hg8 draft coordinates by adding 65,000,000 to each value.
**Coordinates are from SEQ ID NO: 1 and the human genomic sequence from NCBI, (“GenInfo Identifier”), contig NT_033907, gi = 27485382.

[0212] TABLE 3
Summary of NEDD4L genomic resequencing targets and exon
coordinates.

| Resequencing target* | | | Exon coordinates | | | |
|---|---|---|---|---|---|---|
| | | Length | | | | Length |
| Begin | End | (nt.) | | Begin | End | (nt.) |
| 80827 | 82835 | 2008 | exon1 | 82481 | 82723 | 242 |
| 98708 | 99315 | 607 | exon2 | 98954 | 99027 | 73 |
| 127963 | 128583 | 630 | exon2a | 143659 | 143902 | 243 |
| 234613 | 235239 | 626 | exon3 | 234885 | 234966 | 81 |
| 238062 | 238691 | 629 | exon4 | 238357 | 238395 | 38 |
| 241163 | 241797 | 634 | exon5 | 241459 | 241512 | 53 |
| 305150 | 305786 | 636 | exon6 | 305439 | 305489 | 50 |
| 311752 | 312995 | 1243 | exon7 | 311882 | 311943 | 61 |
| | | | exon8 | 312689 | 312791 | 102 |
| 314181 | 314805 | 624 | exon9 | 314453 | 314619 | 166 |
| 318155 | 318757 | 602 | exon10 | 318452 | 318584 | 132 |
| 319956 | 320592 | 636 | exon11 | 320195 | 320371 | 176 |
| 323037 | 323666 | 629 | exon12 | 323275 | 323349 | 74 |
| 324733 | 325219 | 486 | exon13 | 324935 | 324994 | 59 |
| 330241 | 331513 | 1272 | exon14 | 330495 | 330626 | 131 |
| | | | exon15 | 331135 | 331254 | 119 |
| 332149 | 332780 | 631 | exon16 | 332363 | 332560 | 197 |
| 338719 | 339341 | 622 | exon17 | 338994 | 339071 | 77 |
| 340213 | 340849 | 636 | exon18 | 340448 | 340502 | 54 |
| 346361 | 346992 | 631 | exon19 | 346651 | 346709 | 58 |
| 353435 | 354067 | 632 | exon20 | 353725 | 353790 | 65 |
| 355258 | 355899 | 641 | exon21 | 355456 | 355685 | 229 |
| 356971 | 357592 | 621 | exon22 | 357203 | 357324 | 121 |
| 359495 | 360059 | 564 | exon23 | 359854 | 359924 | 70 |
| 362367 | 362997 | 630 | exon24 | 362631 | 362726 | 95 |
| 372427 | 373048 | 621 | exon25 | 372703 | 372776 | 73 |
| 374717 | 375346 | 629 | exon26 | 374983 | 375043 | 60 |
| 376607 | 377237 | 630 | exon27 | 376896 | 376955 | 59 |
| 378280 | 378918 | 638 | exon28 | 378542 | 378649 | 107 |
| 379855 | 380491 | 636 | exon29 | 380103 | 380199 | 96 |
| 380678 | 381313 | 635 | exon30 | 380944 | 381016 | 72 |
| 385395 | 387844 | 2449 | exon31 | 385624 | 387615 | 1991 |
| Total: | 23108 nt. | | | | 5224 nt. | |

*Begin and end coordinates are from the human genome draft assembly hg8 Aug 06, 2001 freeze (www.genome.ucsc.edu, University of California, Santa Cruz). The table coordinates can be indexed to the chromosome 18 hg8 draft coordinates by adding 65,000,000 to each value. The resequencing target is the number of base pairs covered by high quality (phrap >= 20) sequence.

[0213] TABLE 4

Oligonucleotide sequences (SEQ ID NOS:2-119,
from left to right, top to bottom, respectively) for PCR
amplification and sequencing of human NEDD4L.

| | | |
|---|---|---|
| NEDD4L exon | PCR primers (5′-3′) | Sequencing primers (5′-3′) |

| | | |
|---|---|---|
| exon 1 | TCCGAGCAGAGCTCATGTAA | AGAGGCATCGAAGTACACGC |
| | GGCCAGCAAGAGAGATAGGA | AGGTTGCAGTGAGCCAAGAT |
| | | GCTGCCATAACAAAATACCCA |
| | | TCTAGCCCCTGGAATGTGAC |
| | | ATATTGGATTAGGGCCCACC |
| | | TATGAACCTGCCACCTGGAC |
| | | GAAAGTGGCAGAGAGGAAGC |
| | | AGATGAATTAACAGCTCCAGCA |
| exon 2 | GAGGAGAGTTCCAGCCACTG | TGGCAGGAGTAATTGATCTTAATG |
| | TGACTTCACGGTCAAGCAAG | AGAGCCATAGTCCCACACTG |
| exon 2a | GCCTGCTTTCTTCACTTCTGA | GGTGTTGTTTTGTTGCAAGG |
| | GACTGCACCACCCTGAAGA | AAATTTTCACTGTGCCGC |
| exon 3 | GGCTGAGGGTGTCCATAGAA | TGTAAAGTCTGAACAAAATCTGTGTG |
| | CATGGAGATAGGCAAATTAAGACA | GCTGAGGCAGGAGAATCACT |
| exon 4 | TGGAGGCTTTATTGAAGATGC | CTTGGTAGAATAATCATATCAATGCT |
| | GCTTTTCAGTCCTCCACAGG | CGTCTCATAGAATTAAACCATTCTCA |
| exon 5 | GAGCTGATAGATGCTGTTGGC | TCTACAGTCATGAGAATGCCTTG |
| | TGCACTGAATTATAGTGTCACTTCTG | GCCTACCGTTCTGTATTCCC |
| exon 6 | GGCAGCGTGATTAGGTCTGT | CAGCTGTGCCCTCAAACC |
| | AAGACCAGGTGCTGCTCACT | GCCTGAGTGAAGGAGGTGTC |
| exon 7, 8, 9 | AAACCCGGTGTGGATAGTGA | CGTGGACTGTCAGGTACCAA |
| | TCAGCTCATATTGAAAACAGCA | TCTAAAGAGAAATCTCTGCGAGG |
| | | GTGTCACCGACTGTGCAGAT |
| | | GTGACTCAAAGGCAATCGCT |
| exon 10, 11 | GTTCTTCAGACCCCGGCT | GCAAATGGGCAGAGGACTT |
| | TTGGATGAGCCACTTAAGCA | CCACCTATACTTGTCAAATACGGC |
| | | TGATTCACATCATGGCCCTA |
| | | CCAAGAAAGTGTTAGTGGTATAAGG |
| exon 12 | TCAAGGGGAAGAACATGAGC | TTCTGAAAGTTTTGGTCTCGTC |
| | TGTAAGGCAGGTGACGTGAG | TCAAAGTACAGATCACTGGAGCA |
| exon 13 | TGGAAACTGGTGATTCCTCC | TACCCAGGTCAAGGATGAGC |
| | ATGCAATTCCTGTGGCTTCT | TGCACTTAACCAAAGCCTGA |
| exon 14, 15, 16 | CCAAGCTGTGTTCACCTTCA | GGCAGCAACCCTTTACGTT |
| | ACTTTGTGAGACGGGATCAA | GGCAGGGAAGAAGCTACACA |
| | | TGGAAACTGGTGATTCCTCC |
| | | ATGCAATTCCTGTGGCTTCT |
| | | CTGAGTAGCTACCAAAGGATGG |
| | | GAGCTTCCCAGGAGAAAAGG |
| exon 17, 18 | AGTCAGCTCCTGGACTCTGG | CACTGCTGGGACTCTCTTCC |
| | ATGAAGAACATGGCACCTCC | GCCACTTAAATTGTCACCTGC |
| | | TTTTGAGCTAGCAGCCCATT |
| | | GCACTGTTCACAGATTTTTGACT |
| exon 19 | TGCACATTAACTCACTTGGAAGA | AAATCCTTAAAAGAACAGGGGTTT |
| | GATGGAAGAACCAATGGTGG | AGGAAGGGAGGGAATTTTGA |
| exon 20, 21 | TCAATTCCTGAGCCCTCAAC | CACCCTGACTCATATTCTGACAA |
| | AGCCTGGCAATGATGAAATC | TTGTGACTAGGGTTCTGAATTATTTT |
| | | CATCGCTAGTGGATGCCG |
| | | CCATGAACCCAATAGACAAGAA |
| exon 22, 23 | ATTTGGCTGAACCATATGAAA | CTTCGTAGGTCAAAAACAGTCAA |
| | CATGGTTCCAGGAAATGTGA | TTGCTTTCACTAAAGTTATTCCAGA |
| | | TCTGGCCTGCTACCCGC |
| | | AGATCAATGAACTTTTCAAGCAA |
| exon 24 | ACTGCTGGTTTGCCAGTCAT | TTTTGTAGACCAGTATGGCAGC |
| | GTGACACCTGCATCCACAG | AACCGAGGCACAAATGAAAC |
| exon 25, 26 | TTTCTGGAGTCTTGATGGGTG | GTTTCCTGATAAATGAATAGCAGAG |
| | GGGACTGCGCTTCATCAT | TCTTAGTTGATATCCACATATTCCAA |
| | | AAAGCATTTTAAAGCAGTTAAGCA |
| | | GTACCGCCTGAAACTCCAAG |
| exon 27, 28 | CACTGCCCAGATCGAACTTT | GCACTGACTCACAGCAGTGTT |
| | CACAGATCAAAATATTTGTTGGAA | CAGCTCTGCTCAGTGGCCT |
| | | CTAGAGGGGTAGGGAGGACG |
| | | GGAGGACCAGTCCCTCAAAT |
| exon 29, 30 | ATTATCTTAGGGCCACTGTTG | TGGTGCCATCAGAGAGTTTG |
| | TGACTTGGACACCATTTGGA | CGACCATATAAATGACCCTACAA |
| | | GCCCAGCTGAGAGGCTGT |
| | | CAGGTTGAGAGCTGCCTTATC |
| exon 31 | ATTGAGCCCTTGCTGTATGC | CTCCGAGATCTGCATCTGACT |
| | CAAGATGACAGAAGAATCCCAG | TTAATTCCATTCATTGTCATTAGAA |
| | | ACCTGGTCCCAGCTTGAGTT |
| | | TCGGATGAGAAATGGGAGTC |
| | | CCATACTCAGAATGAAAAACTGGA |
| | | TGAAGCATGCAACAGGTCAT |
| | | TCAATTGTGAATCTGGCTGC |
| | | GAAAAAGGAACCAACACTCAGC |
| | | AAGTTGTGGTTTGGGGAGGT |
| | | GGTTAGAATTGGATTTCTCCCTC |

[0214] TABLE 5

Oligonucleotide sequences (SEQ ID NOS:120-130,
respectively) for RT-PCR and RACE experiments.

| location | primer sequence |
|---|---|
| RT-PCR | |
| exon 1 | CCATTTCCAGAGAGGAACAACCGTG |
| isoform II | GCGCCGGCTCCATGGCGACC |
| exon 3 | AGCAAGTTCTCTATTCTCATCCGCT |
| RACE | |
| exon 2 | CTGGCTCCAAAGATGTCCTTTTTGG |
| | CGAGATCAATTCCAGAAACAAC |
| exon 2a | GAGTGGGAGGTGCCGTGCTGG |
| | GGAAGAGCTCGTCTGAAGTGG |
| exon 2c | GCTGCTGGAAATCTACCTTGG |
| | GGCTGGAAAGTGTTCAGCTGG |
| exon 3 | CCGCTACGTACAATGAAAGTTTCAC |
| | AGCAAGTTCTCTATTCTCATCCGCT |

[0215] TABLE 6
NEDD4L Association with Postural Blood Pressure Traits (Adjusted or
Age, Age, Age, and Sex) in Treated Hypertensives, Stratified by
Medication Class.

| | Medication Group 1* | | | Medication Group 2** | | |
|---|---|---|---|---|---|---|
| | Only | | | Only | | |
| Trait | AG or AA | GG | p-value | AG or AA | GG | p-value |
| N | 65 | 43 | | 71 | 57 | |
| delta SBP (t1) | −5.4 | −14.9 | 0.007 | 2.4 | 2.9 | 0.86*** |
| delta SBP (t2) | 3.6 | −1.4 | 0.08 | 5.3 | 8.8 | 0.22 |
| supine SBP | 135.2 | 137.8 | 0.47 | 130.2 | 124.3 | 0.07 |
| standing SBP | 129.8 | 122.9 | 0.10 | 132.5 | 127.2 | 0.17 |
| (t1) | | | | | | |
| standing SBP | 138.8 | 136.4 | 0.51 | 135.5 | 133.1 | 0.51 |
| (t2) | | | | | | |

*diuretics, calcium channel blockers, and/or adrenolytics
**beta blockers, ace inhibitors, and/or angiotensin II receptor antagonists
***p = 0.02 for formal test of genotype × medication group interaction

[0216] Tables 7-17 are indexed to SEQ ID NO: 1 and the genomic sequence from NCBI, (“GenInfo Identifier”), contig NT_{—}033907, gi=27485382.

TABLE 7
Isoform I exon-intron boundaries and translation start site.

| | | | | Translation |
|---|---|---|---|---|
| | | | | start |
| Genomic | Exon | Exon start | Exon end | coordinate |
| gi\|27485382:1-1080000 | 1_G | 826667 | 827008 | 826985 |
| gi\|27485382:1-1080000 | 2 | 843242 | 843315 | |
| gi\|27485382:1-1080000 | 3 | 922549 | 922630 | |
| gi\|27485382:1-1080000 | 4 | 926021 | 926059 | |
| gi\|27485382:1-1080000 | 5 | 929123 | 929176 | |
| gi\|27485382:1-1080000 | 6 | 993104 | 993154 | |
| gi\|27485382:1-1080000 | 7 | 999547 | 999608 | |
| gi\|27485382:1-1080000 | 8 | 1000354 | 1000456 | |
| gi\|27485382:1-1080000 | 9 | 1002118 | 1002284 | |
| gi\|27485382:1-1080000 | 10 | 1006117 | 1006249 | |
| gi\|27485382:1-1080000 | 11 | 1007860 | 1008036 | |
| gi\|27485382:1-1080000 | 12 | 1010940 | 1011014 | |
| gi\|27485382:1-1080000 | 13 | 1018160 | 1018291 | |
| gi\|27485382:1-1080000 | 14 | 1018800 | 1018919 | |
| gi\|27485382:1-1080000 | 15 | 1020028 | 1020225 | |
| gi\|27485382:1-1080000 | 16 | 1026659 | 1026736 | |
| gi\|27485382:1-1080000 | 17 | 1028113 | 1028167 | |
| gi\|27485382:1-1080000 | 18 | 1034316 | 1034374 | |
| gi\|27485382:1-1080000 | 19 | 1041390 | 1041455 | |
| gi\|27485382:1-1080000 | 20 | 1043121 | 1043350 | |
| gi\|27485382:1-1080000 | 21 | 1044868 | 1044989 | |
| gi\|27485382:1-1080000 | 22 | 1047519 | 1047589 | |
| gi\|27485382:1-1080000 | 23 | 1050296 | 1050391 | |
| gi\|27485382:1-1080000 | 24 | 1060368 | 1060441 | |
| gi\|27485382:1-1080000 | 25 | 1062648 | 1062708 | |
| gi\|27485382:1-1080000 | 26 | 1064561 | 1064620 | |
| gi\|27485382:1-1080000 | 27 | 1066207 | 1066314 | |
| gi\|27485382:1-1080000 | 28 | 1067768 | 1067864 | |
| gi\|27485382:1-1080000 | 29 | 1068609 | 1068681 | |
| gi\|27485382:1-1080000 | 30 | 1073289 | 1075279 | |

Full length cDNA shown in SEQ ID NO: 181
Encoded Protein is shown in SEQ ID NO: 182

[0217] TABLE 8
Isoform generated by variant 13-A

| | | | | Translation |
|---|---|---|---|---|
| | | | | start |
| Genomic | Exon | Exon start | Exon end | coordinate |
| gi\|27485382:1-1080000 | 1_A | 826667 | 827018 | 826985 |
| gi\|27485382:1-1080000 | 2 | 843242 | 843315 | |
| gi\|27485382:1-1080000 | 3 | 922549 | 922630 | |
| gi\|27485382:1-1080000 | 4 | 926021 | 926059 | |
| gi\|27485382:1-1080000 | 5 | 929123 | 929176 | |
| gi\|27485382:1-1080000 | 6 | 993104 | 993154 | |
| gi\|27485382:1-1080000 | 7 | 999547 | 999608 | |
| gi\|27485382:1-1080000 | 8 | 1000354 | 1000456 | |
| gi\|27485382:1-1080000 | 9 | 1002118 | 1002284 | |
| gi\|27485382:1-1080000 | 10 | 1006117 | 1006249 | |
| gi\|27485382:1-1080000 | 11 | 1007860 | 1008036 | |
| gi\|27485382:1-1080000 | 12 | 1010940 | 1011014 | |
| gi\|27485382:1-1080000 | 13 | 1018160 | 1018291 | |
| gi\|27485382:1-1080000 | 14 | 1018800 | 1018919 | |
| gi\|27485382:1-1080000 | 15 | 1020028 | 1020225 | |
| gi\|27485382:1-1080000 | 16 | 1026659 | 1026736 | |
| gi\|27485382:1-1080000 | 17 | 1028113 | 1028167 | |
| gi\|27485382:1-1080000 | 18 | 1034316 | 1034374 | |
| gi\|27485382:1-1080000 | 19 | 1041390 | 1041455 | |
| gi\|27485382:1-1080000 | 20 | 1043121 | 1043350 | |
| gi\|27485382:1-1080000 | 21 | 1044868 | 1044989 | |
| gi\|27485382:1-1080000 | 22 | 1047519 | 1047589 | |
| gi\|27485382:1-1080000 | 23 | 1050296 | 1050391 | |
| gi\|27485382:1-1080000 | 24 | 1060368 | 1060441 | |
| gi\|27485382:1-1080000 | 25 | 1062648 | 1062708 | |
| gi\|27485382:1-1080000 | 26 | 1064561 | 1064620 | |
| gi\|27485382:1-1080000 | 27 | 1066207 | 1066314 | |
| gi\|27485382:1-1080000 | 28 | 1067768 | 1067864 | |
| gi\|27485382:1-1080000 | 29 | 1068609 | 1068681 | |
| gi\|27485382:1-1080000 | 30 | 1073289 | 1075279 | |

Full length DNA = SEQ ID NO: 183
Protein = SEQ ID NO: 184

[0218] TABLE 9
Isoform generated by a novel exon 1 (Exon 1a)

| | | | | Translation |
|---|---|---|---|---|
| Genomic | Exon | Exon start | Exon end | start coordinate |
| gi\|27485382:1-1080000 | 1a | 722213 | 722534 | 722487 |
| gi\|27485382:1-1080000 | 2 | 843242 | 843315 | |
| gi\|27485382:1-1080000 | 3 | 922549 | 922630 | |
| gi\|27485382:1-1080000 | 4 | 926021 | 926059 | |
| gi\|27485382:1-1080000 | 5 | 929123 | 929176 | |
| gi\|27485382:1-1080000 | 6 | 993104 | 993154 | |
| gi\|27485382:1-1080000 | 7 | 999547 | 999608 | |
| gi\|27485382:1-1080000 | 8 | 1000354 | 1000456 | |
| gi\|27485382:1-1080000 | 9 | 1002118 | 1002284 | |
| gi\|27485382:1-1080000 | 10 | 1006117 | 1006249 | |
| gi\|27485382:1-1080000 | 11 | 1007860 | 1008036 | |
| gi\|27485382:1-1080000 | 12 | 1010940 | 1011014 | |
| gi\|27485382:1-1080000 | 13 | 1018160 | 1018291 | |
| gi\|27485382:1-1080000 | 14 | 1018800 | 1018919 | |
| gi\|27485382:1-1080000 | 15 | 1020028 | 1020225 | |
| gi\|27485382:1-1080000 | 16 | 1026659 | 1026736 | |
| gi\|27485382:1-1080000 | 17 | 1028113 | 1028167 | |
| gi\|27485382:1-1080000 | 18 | 1034316 | 1034374 | |
| gi\|27485382:1-1080000 | 19 | 1041390 | 1041455 | |
| gi\|27485382:1-1080000 | 20 | 1043121 | 1043350 | |
| gi\|27485382:1-1080000 | 21 | 1044868 | 1044989 | |
| gi\|27485382:1-1080000 | 22 | 1047519 | 1047589 | |
| gi\|27485382:1-1080000 | 23 | 1050296 | 1050391 | |
| gi\|27485382:1-1080000 | 24 | 1060368 | 1060441 | |
| gi\|27485382:1-1080000 | 25 | 1062648 | 1062708 | |
| gi\|27485382:1-1080000 | 26 | 1064561 | 1064620 | |
| gi\|27485382:1-1080000 | 27 | 1066207 | 1066314 | |
| gi\|27485382:1-1080000 | 28 | 1067768 | 1067864 | |
| gi\|27485382:1-1080000 | 29 | 1068609 | 1068681 | |
| gi\|27485382:1-1080000 | 30 | 1073289 | 1075279 | |

Full length DNA = SEQ ID NO: 185
Protein = SEQ ID NO: 186

[0219] TABLE 10
Isoform generated by novel exon 1 (Exon 1b)

| | | | | Translation |
|---|---|---|---|---|
| Genomic | Exon | Exon start | Exon end | start coordinate |
| gi\|27485382:1-1080000 | 1b | 723319 | 723442 | |
| gi\|27485382:1-1080000 | 2 | 843242 | 843315 | |
| gi\|27485382:1-1080000 | 3 | 922549 | 922630 | |
| gi\|27485382:1-1080000 | 4 | 926021 | 926059 | |
| gi\|27485382:1-1080000 | 5 | 929123 | 929176 | |
| gi\|27485382:1-1080000 | 6 | 993104 | 993154 | |
| gi\|27485382:1-1080000 | 7 | 999547 | 999608 | 999562 |
| gi\|27485382:1-1080000 | 8 | 1000354 | 1000456 | |
| gi\|27485382:1-1080000 | 9 | 1002118 | 1002284 | |
| gi\|27485382:1-1080000 | 10 | 1006117 | 1006249 | |
| gi\|27485382:1-1080000 | 11 | 1007860 | 1008036 | |
| gi\|27485382:1-1080000 | 12 | 1010940 | 1011014 | |
| gi\|27485382:1-1080000 | 13 | 1018160 | 1018291 | |
| gi\|27485382:1-1080000 | 14 | 1018800 | 1018919 | |
| gi\|27485382:1-1080000 | 15 | 1020028 | 1020225 | |
| gi\|27485382:1-1080000 | 16 | 1026659 | 1026736 | |
| gi\|27485382:1-1080000 | 17 | 1028113 | 1028167 | |
| gi\|27485382:1-1080000 | 18 | 1034316 | 1034374 | |
| gi\|27485382:1-1080000 | 19 | 1041390 | 1041455 | |
| gi\|27485382:1-1080000 | 20 | 1043121 | 1043350 | |
| gi\|27485382:1-1080000 | 21 | 1044868 | 1044989 | |
| gi\|27485382:1-1080000 | 22 | 1047519 | 1047589 | |
| gi\|27485382:1-1080000 | 23 | 1050296 | 1050391 | |
| gi\|27485382:1-1080000 | 24 | 1060368 | 1060441 | |
| gi\|27485382:1-1080000 | 25 | 1062648 | 1062708 | |
| gi\|27485382:1-1080000 | 26 | 1064561 | 1064620 | |
| gi\|27485382:1-1080000 | 27 | 1066207 | 1066314 | |
| gi\|27485382:1-1080000 | 28 | 1067768 | 1067864 | |
| gi\|27485382:1-1080000 | 29 | 1068609 | 1068681 | |
| gi\|27485382:1-1080000 | 30 | 1073289 | 1075279 | |

Full length DNA = SEQ ID NO: 187
Protein = SEQ ID NO: 188

[0220] TABLE 11
Isoform generated by novel exon 1 (Exon 1c)

| | | | | Translation |
|---|---|---|---|---|
| Genomic | Exon | Exon start | Exon end | start coordinate |
| gi\|27485382:1-1080000 | 1c | 723483 | 723516 | 723508 |
| gi\|27485382:1-1080000 | 2 | 843242 | 843315 | |
| gi\|27485382:1-1080000 | 3 | 922549 | 922630 | |
| gi\|27485382:1-1080000 | 4 | 926021 | 926059 | |
| gi\|27485382:1-1080000 | 5 | 929123 | 929176 | |
| gi\|27485382:1-1080000 | 6 | 993104 | 993154 | |
| gi\|27485382:1-1080000 | 7 | 999547 | 999608 | |
| gi\|27485382:1-1080000 | 8 | 1000354 | 1000456 | |
| gi\|27485382:1-1080000 | 9 | 1002118 | 1002284 | |
| gi\|27485382:1-1080000 | 10 | 1006117 | 1006249 | |
| gi\|27485382:1-1080000 | 11 | 1007860 | 1008036 | |
| gi\|27485382:1-1080000 | 12 | 1010940 | 1011014 | |
| gi\|27485382:1-1080000 | 13 | 1018160 | 1018291 | |
| gi\|27485382:1-1080000 | 14 | 1018800 | 1018919 | |
| gi\|27485382:1-1080000 | 15 | 1020028 | 1020225 | |
| gi\|27485382:1-1080000 | 16 | 1026659 | 1026736 | |
| gi\|27485382:1-1080000 | 17 | 1028113 | 1028167 | |
| gi\|27485382:1-1080000 | 18 | 1034316 | 1034374 | |
| gi\|27485382:1-1080000 | 19 | 1041390 | 1041455 | |
| gi\|27485382:1-1080000 | 20 | 1043121 | 1043350 | |
| gi\|27485382:1-1080000 | 21 | 1044868 | 1044989 | |
| gi\|27485382:1-1080000 | 22 | 1047519 | 1047589 | |
| gi\|27485382:1-1080000 | 23 | 1050296 | 1050391 | |
| gi\|27485382:1-1080000 | 24 | 1060368 | 1060441 | |
| gi\|27485382:1-1080000 | 25 | 1062648 | 1062708 | |
| gi\|27485382:1-1080000 | 26 | 1064561 | 1064620 | |
| gi\|27485382:1-1080000 | 27 | 1066207 | 1066314 | |
| gi\|27485382:1-1080000 | 28 | 1067768 | 1067864 | |
| gi\|27485382:1-1080000 | 29 | 1068609 | 1068681 | |
| gi\|27485382:1-1080000 | 30 | 1073289 | 1075279 | |

Full length DNA = SEQ ID NO: 189
Protein = SEQ ID NO: 190

[0221] TABLE 12
Isoform generated by novel exon 1 (Exon 1d)

| | | | | Translation |
|---|---|---|---|---|
| Genomic | Exon | Exon start | Exon end | start coordinate |
| gi\|27485382:1-1080000 | 1d | 723499 | 723614 | |
| gi\|27485382:1-1080000 | 2 | 843242 | 843315 | |
| gi\|27485382:1-1080000 | 3 | 922549 | 922630 | |
| gi\|27485382:1-1080000 | 4 | 926021 | 926059 | |
| gi\|27485382:1-1080000 | 5 | 929123 | 929176 | |
| gi\|27485382:1-1080000 | 6 | 993104 | 993154 | |
| gi\|27485382:1-1080000 | 7 | 999547 | 999608 | 999562 |
| gi\|27485382:1-1080000 | 8 | 1000354 | 1000456 | |
| gi\|27485382:1-1080000 | 9 | 1002118 | 1002284 | |
| gi\|27485382:1-1080000 | 10 | 1006117 | 1006249 | |
| gi\|27485382:1-1080000 | 11 | 1007860 | 1008036 | |
| gi\|27485382:1-1080000 | 12 | 1010940 | 1011014 | |
| gi\|27485382:1-1080000 | 13 | 1018160 | 1018291 | |
| gi\|27485382:1-1080000 | 14 | 1018800 | 1018919 | |
| gi\|27485382:1-1080000 | 15 | 1020028 | 1020225 | |
| gi\|27485382:1-1080000 | 16 | 1026659 | 1026736 | |
| gi\|27485382:1-1080000 | 17 | 1028113 | 1028167 | |
| gi\|27485382:1-1080000 | 18 | 1034316 | 1034374 | |
| gi\|27485382:1-1080000 | 19 | 1041390 | 1041455 | |
| gi\|27485382:1-1080000 | 20 | 1043121 | 1043350 | |
| gi\|27485382:1-1080000 | 21 | 1044868 | 1044989 | |
| gi\|27485382:1-1080000 | 22 | 1047519 | 1047589 | |
| gi\|27485382:1-1080000 | 23 | 1050296 | 1050391 | |
| gi\|27485382:1-1080000 | 24 | 1060368 | 1060441 | |
| gi\|27485382:1-1080000 | 25 | 1062648 | 1062708 | |
| gi\|27485382:1-1080000 | 26 | 1064561 | 1064620 | |
| gi\|27485382:1-1080000 | 27 | 1066207 | 1066314 | |
| gi\|27485382:1-1080000 | 28 | 1067768 | 1067864 | |
| gi\|27485382:1-1080000 | 29 | 1068609 | 1068681 | |
| gi\|27485382:1-1080000 | 30 | 1073289 | 1075279 | |

Full length DNA = SEQ ID NO: 191
Protein = SEQ ID NO: 192

[0222] TABLE 13
Isoform generated by a novel exon (Exon 1e)

| | | | | Translation |
|---|---|---|---|---|
| Genomic | Exon | Exon start | Exon end | start coordinate |
| gi\|27485382:1-1080000 | 1e | 723738 | 723844 | |
| gi\|27485382:1-1080000 | 2 | 843242 | 843315 | |
| gi\|27485382:1-1080000 | 3 | 922549 | 922630 | |
| gi\|27485382:1-1080000 | 4 | 926021 | 926059 | |
| gi\|27485382:1-1080000 | 5 | 929123 | 929176 | |
| gi\|27485382:1-1080000 | 6 | 993104 | 993154 | |
| gi\|27485382:1-1080000 | 7 | 999547 | 999608 | 999562 |
| gi\|27485382:1-1080000 | 8 | 1000354 | 1000456 | |
| gi\|27485382:1-1080000 | 9 | 1002118 | 1002284 | |
| gi\|27485382:1-1080000 | 10 | 1006117 | 1006249 | |
| gi\|27485382:1-1080000 | 11 | 1007860 | 1008036 | |
| gi\|27485382:1-1080000 | 12 | 1010940 | 1011014 | |
| gi\|27485382:1-1080000 | 13 | 1018160 | 1018291 | |
| gi\|27485382:1-1080000 | 14 | 1018800 | 1018919 | |
| gi\|27485382:1-1080000 | 15 | 1020028 | 1020225 | |
| gi\|27485382:1-1080000 | 16 | 1026659 | 1026736 | |
| gi\|27485382:1-1080000 | 17 | 1028113 | 1028167 | |
| gi\|27485382:1-1080000 | 18 | 1034316 | 1034374 | |
| gi\|27485382:1-1080000 | 19 | 1041390 | 1041455 | |
| gi\|27485382:1-1080000 | 20 | 1043121 | 1043350 | |
| gi\|27485382:1-1080000 | 21 | 1044868 | 1044989 | |
| gi\|27485382:1-1080000 | 22 | 1047519 | 1047589 | |
| gi\|27485382:1-1080000 | 23 | 1050296 | 1050391 | |
| gi\|27485382:1-1080000 | 24 | 1060368 | 1060441 | |
| gi\|27485382:1-1080000 | 25 | 1062648 | 1062708 | |
| gi\|27485382:1-1080000 | 26 | 1064561 | 1064620 | |
| gi\|27485382:1-1080000 | 27 | 1066207 | 1066314 | |
| gi\|27485382:1-1080000 | 28 | 1067768 | 1067864 | |
| gi\|27485382:1-1080000 | 29 | 1068609 | 1068681 | |
| gi\|27485382:1-1080000 | 30 | 1073289 | 1075279 | |

Full length DNA = SEQ ID NO: 193
Protein = SEQ ID NO: 194

[0223] TABLE 14
Isoform III (Exon 2a-exon3)

| | | | | Translation |
|---|---|---|---|---|
| Genomic | Exon | Exon start | Exon end | start coordinate |
| gi\|27485382:1-1080000 | 2a | 872617 | 872860 | |
| gi\|27485382:1-1080000 | 3 | 922549 | 922630 | |
| gi\|27485382:1-1080000 | 4 | 926021 | 926059 | |
| gi\|27485382:1-1080000 | 5 | 929123 | 929176 | |
| gi\|27485382:1-1080000 | 6 | 993104 | 993154 | |
| gi\|27485382:1-1080000 | 7 | 999547 | 999608 | 999562 |
| gi\|27485382:1-1080000 | 8 | 1000354 | 1000456 | |
| gi\|27485382:1-1080000 | 9 | 1002118 | 1002284 | |
| gi\|27485382:1-1080000 | 10 | 1006117 | 1006249 | |
| gi\|27485382:1-1080000 | 11 | 1007860 | 1008036 | |
| gi\|27485382:1-1080000 | 12 | 1010940 | 1011014 | |
| gi\|27485382:1-1080000 | 13 | 1018160 | 1018291 | |
| gi\|27485382:1-1080000 | 14 | 1018800 | 1018919 | |
| gi\|27485382:1-1080000 | 15 | 1020028 | 1020225 | |
| gi\|27485382:1-1080000 | 16 | 1026659 | 1026736 | |
| gi\|27485382:1-1080000 | 17 | 1028113 | 1028167 | |
| gi\|27485382:1-1080000 | 18 | 1034316 | 1034374 | |
| gi\|27485382:1-1080000 | 19 | 1041390 | 1041455 | |
| gi\|27485382:1-1080000 | 20 | 1043121 | 1043350 | |
| gi\|27485382:1-1080000 | 21 | 1044868 | 1044989 | |
| gi\|27485382:1-1080000 | 22 | 1047519 | 1047589 | |
| gi\|27485382:1-1080000 | 23 | 1050296 | 1050391 | |
| gi\|27485382:1-1080000 | 24 | 1060368 | 1060441 | |
| gi\|27485382:1-1080000 | 25 | 1062648 | 1062708 | |
| gi\|27485382:1-1080000 | 26 | 1064561 | 1064620 | |
| gi\|27485382:1-1080000 | 27 | 1066207 | 1066314 | |
| gi\|27485382:1-1080000 | 28 | 1067768 | 1067864 | |
| gi\|27485382:1-1080000 | 29 | 1068609 | 1068681 | |
| gi\|27485382:1-1080000 | 30 | 1073289 | 1075279 | |

Full length DNA = SEQ ID NO: 195
Protein = SEQ ID NO: 196

[0224] TABLE 15
Isoform VI (Exon 2b-Exon 3)

| | | | | Translation |
|---|---|---|---|---|
| Genomic | Exon | Exon start | Exon end | start coordinate |
| gi\|27485382:1-1080000 | 2b | 874858 | 874996 | |
| gi\|27485382:1-1080000 | 3 | 922549 | 922630 | |
| gi\|27485382:1-1080000 | 4 | 926021 | 926059 | |
| gi\|27485382:1-1080000 | 5 | 929123 | 929176 | |
| gi\|27485382:1-1080000 | 6 | 993104 | 993154 | 8 |
| gi\|27485382:1-1080000 | 7 | 999547 | 999608 | 999562 |
| gi\|27485382:1-1080000 | 8 | 1000354 | 1000456 | |
| gi\|27485382:1-1080000 | 9 | 1002118 | 1002284 | |
| gi\|27485382:1-1080000 | 10 | 1006117 | 1006249 | |
| gi\|27485382:1-1080000 | 11 | 1007860 | 1008036 | |
| gi\|27485382:1-1080000 | 12 | 1010940 | 1011014 | |
| gi\|27485382:1-1080000 | 13 | 1018160 | 1018291 | |
| gi\|27485382:1-1080000 | 14 | 1018800 | 1018919 | |
| gi\|27485382:1-1080000 | 15 | 1020028 | 1020225 | |
| gi\|27485382:1-1080000 | 16 | 1026659 | 1026736 | |
| gi\|27485382:1-1080000 | 17 | 1028113 | 1028167 | |
| gi\|27485382:1-1080000 | 18 | 1034316 | 1034374 | |
| gi\|27485382:1-1080000 | 19 | 1041390 | 1041455 | |
| gi\|27485382:1-1080000 | 20 | 1043121 | 1043350 | |
| gi\|27485382:1-1080000 | 21 | 1044868 | 1044989 | |
| gi\|27485382:1-1080000 | 22 | 1047519 | 1047589 | |
| gi\|27485382:1-1080000 | 23 | 1050296 | 1050391 | |
| gi\|27485382:1-1080000 | 24 | 1060368 | 1060441 | |
| gi\|27485382:1-1080000 | 25 | 1062648 | 1062708 | |
| gi\|27485382:1-1080000 | 26 | 1064561 | 1064620 | |
| gi\|27485382:1-1080000 | 27 | 1066207 | 1066314 | |
| gi\|27485382:1-1080000 | 28 | 1067768 | 1067864 | |
| gi\|27485382:1-1080000 | 29 | 1068609 | 1068681 | |
| gi\|27485382:1-1080000 | 30 | 1073289 | 1075279 | |

Full length DNA = SEQ ID NO: 197
Protein = SEQ ID NO: 198

[0225] TABLE 16
Isoform IV (Exon 2c-Exon 3)

| | | | | Translation |
|---|---|---|---|---|
| Genomic | Exon | Exon start | Exon end | start coordinate |
| gi\|27485382:1-1080000 | 2c | 898644 | 898879 | |
| gi\|27485382:1-1080000 | 3 | 922549 | 922630 | |
| gi\|27485382:1-1080000 | 4 | 926021 | 926059 | |
| gi\|27485382:1-1080000 | 5 | 929123 | 929176 | |
| gi\|27485382:1-1080000 | 6 | 993104 | 993154 | |
| gi\|27485382:1-1080000 | 7 | 999547 | 999608 | 999562 |
| gi\|27485382:1-1080000 | 8 | 1000354 | 1000456 | |
| gi\|27485382:1-1080000 | 9 | 1002118 | 1002284 | |
| gi\|27485382:1-1080000 | 10 | 1006117 | 1006249 | |
| gi\|27485382:1-1080000 | 11 | 1007860 | 1008036 | |
| gi\|27485382:1-1080000 | 12 | 1010940 | 1011014 | |
| gi\|27485382:1-1080000 | 13 | 1018160 | 1018291 | |
| gi\|27485382:1-1080000 | 14 | 1018800 | 1018919 | |
| gi\|27485382:1-1080000 | 15 | 1020028 | 1020225 | |
| gi\|27485382:1-1080000 | 16 | 1026659 | 1026736 | |
| gi\|27485382:1-1080000 | 17 | 1028113 | 1028167 | |
| gi\|27485382:1-1080000 | 18 | 1034316 | 1034374 | |
| gi\|27485382:1-1080000 | 19 | 1041390 | 1041455 | |
| gi\|27485382:1-1080000 | 20 | 1043121 | 1043350 | |
| gi\|27485382:1-1080000 | 21 | 1044868 | 1044989 | |
| gi\|27485382:1-1080000 | 22 | 1047519 | 1047589 | |
| gi\|27485382:1-1080000 | 23 | 1050296 | 1050391 | |
| gi\|27485382:1-1080000 | 24 | 1060368 | 1060441 | |
| gi\|27485382:1-1080000 | 25 | 1062648 | 1062708 | |
| gi\|27485382:1-1080000 | 26 | 1064561 | 1064620 | |
| gi\|27485382:1-1080000 | 27 | 1066207 | 1066314 | |
| gi\|27485382:1-1080000 | 28 | 1067768 | 1067864 | |
| gi\|27485382:1-1080000 | 29 | 1068609 | 1068681 | |
| gi\|27485382:1-1080000 | 30 | 1073289 | 1075279 | |

Full length DNA = SEQ ID NO: 199
Protein = SEQ ID NO: 200

[0226] TABLE 17
Isoform V (Exon 2a-Exon 2c-Exon 3)

| | | | | Translation |
|---|---|---|---|---|
| Genomic | Exon | Exon start | Exon end | start coordinate |
| gi\|27485382:1-1080000 | 2a | 872617 | 872860 | |
| gi\|27485382:1-1080000 | 2d | 904952 | 905030 | |
| gi\|27485382:1-1080000 | 3 | 922549 | 922631 | |
| gi\|27485382:1-1080000 | 4 | 926021 | 926060 | |
| gi\|27485382:1-1080000 | 5 | 929123 | 929177 | |
| gi\|27485382:1-1080000 | 6 | 993104 | 993155 | |
| gi\|27485382:1-1080000 | 7 | 999547 | 999609 | 999562 |
| gi\|27485382:1-1080000 | 8 | 1000354 | 1000457 | |
| gi\|27485382:1-1080000 | 9 | 1002118 | 1002285 | |
| gi\|27485382:1-1080000 | 10 | 1006117 | 1006250 | |
| gi\|27485382:1-1080000 | 11 | 1007860 | 1008037 | |
| gi\|27485382:1-1080000 | 12 | 1010940 | 1011015 | |
| gi\|27485382:1-1080000 | 13 | 1018160 | 1018292 | |
| gi\|27485382:1-1080000 | 14 | 1018800 | 1018920 | |
| gi\|27485382:1-1080000 | 15 | 1020028 | 1020226 | |
| gi\|27485382:1-1080000 | 16 | 1026659 | 1026737 | |
| gi\|27485382:1-1080000 | 17 | 1028113 | 1028168 | |
| gi\|27485382:1-1080000 | 18 | 1034316 | 1034375 | |
| gi\|27485382:1-1080000 | 19 | 1041390 | 1041456 | |
| gi\|27485382:1-1080000 | 20 | 1043121 | 1043351 | |
| gi\|27485382:1-1080000 | 21 | 1044868 | 1044990 | |
| gi\|27485382:1-1080000 | 22 | 1047519 | 1047590 | |
| gi\|27485382:1-1080000 | 23 | 1050296 | 1050392 | |
| gi\|27485382:1-1080000 | 24 | 1060368 | 1060442 | |
| gi\|27485382:1-1080000 | 25 | 1062648 | 1062709 | |
| gi\|27485382:1-1080000 | 26 | 1064561 | 1064621 | |
| gi\|27485382:1-1080000 | 27 | 1066207 | 1066315 | |
| gi\|27485382:1-1080000 | 28 | 1067768 | 1067865 | |
| gi\|27485382:1-1080000 | 29 | 1068609 | 1068682 | |
| gi\|27485382:1-1080000 | 30 | 1073289 | 1075280 | |

Full length DNA = SEQ ID NO: 201
Protein = SEQ ID NO: 202

### REFERENCES

[0227] 1. Corvol P, Persu A, Gimenez-Roqueplo A P and Jeunemaitre X. Seven lessons from two candidate genes in human essential hypertension: angiotensinogen and epithelial sodium channel. Hypertension 33: 1324-1331, 1999.
[0228] 2. Luft F C. Molecular genetics of human hypertension. Curr Opin Nephrol Hypertens 9: 259-266, 2000.
[0229] 3. Lifton R P, Gharavi A G and Geller D S. Molecular mechanisms of human hypertension. Cell 104: 545-556, 2001.
[0230] 4. Liddle G W, Bledsoe T and Coppage W S, Jr. A familial renal disorder simulating primary aldosteronism but with negligible aldosterone secretion. Trans. Assoc. Am. Physicians 76: 199-213, 1963.
[0231] 5. Shimkets R A, Warnock D G, Bositis C M, Nelson-Williams C, Hansson J H, Schambelan M, Gill J R, Jr., Ulick S, Milora R V, Findling J W and et al. Liddle's syndrome: heritable human hypertension caused by mutations in the beta subunit of the epithelial sodium channel. Cell 79: 407-414, 1994.
[0232] 6. Schild L, Canessa C M, Shimkets R A, Gautschi I, Lifton R P and Rossier B C. A mutation in the epithelial sodium channel causing Liddle disease increases channel activity in the Xenopus laevis oocyte expression system. Proc Natl Acad Sci USA 92: 5699-5703, 1995.
[0233] 7. Debonneville C, Flores S Y, Kamynina E, Plant P J, Tauxe C, Thomas M A, Munster C, Chraibi A, Pratt J H, Horisberger J D, Pearce D, Loffing J and Staub O. Phosphorylation of Nedd4-2 by Sgkl regulates epithelial Na(+) channel cell surface expression. Embo J20: 7052-7059, 2001.
[0234] 8. Snyder P M, Olson D R and Thomas B C. Serum and Glucocorticoid-regulated Kinase Modulates Nedd4-2-mediated Inhibition of the Epithelial Na+ Channel. J Bio Chem 277: 5-8, 2002.
[0235] 9. Lemmon S K and Traub L M. Sorting in the endosomal system in yeast and animal cells. Curr Opin Cell Bio 12: 457-466, 2000.
[0236] 10. Staub O, Dho S, Henry P, Correa J, Ishikawa T, McGlade J and Rotin D. W W domains of Nedd4 bind to the proline-rich PY motifs in the epithelial Na+ channel deleted in Liddle's syndrome. Embo J 15: 2371-2380, 1996.
[0237] 11. Kamynina E, Tauxe C and Staub O. Distinct characteristics of two human Nedd4 proteins with respect to epithelial Na(+) channel regulation. Am J Physiol Renal Physiol 281: F469-477, 2001a.
[0238] 12. Kamynina E, Debonneville C, Bens M, Vandewalle A and Staub O. A novel mouse Nedd4 protein suppresses the activity of the epithelial Na+ channel. Faseb J 15: 204-214, 2001b.
[0239] 13. Harvey K F, Dinudom A, Cook D I and Kumar S. The Nedd4-like protein KIAA0439 (SEQ ID NO: 154) is a potential regulator of the epithelial sodium channel. J Bio Chem 276: 8597-8601, 2001.
[0240] 14. Atwood L D, Samollow P B, Hixson J E, Stern M P and MacCluer J W. Genome-wide linkage analysis of blood pressure in Mexican Americans. Genet Epidemiol 20: 373-382, 2001.
[0241] 15. Pankow J S, Rose K M, Oberman A, Hunt S C, Atwood L D, Djousse L, Province M A and Rao D C. Possible locus on chromosome 18q influencing postural systolic blood pressure changes. Hypertension 36: 471-476, 2000.
[0242] 16. DeStefano A L, Baldwin C T, Burzstyn M, Gavras I, Handy D E, Joost O, Martel T, Nicolaou M, Schwartz F, Streeten D H, Farrer L A and Gavras H. Autosomal dominant orthostatic hypotensive disorder maps to chromosome 18q. Am J Hum Genet 63: 1425-1430, 1998.
[0243] 17. Williams R R, Rao D C, Ellison R C, Arnett D K, Heiss G, Oberman A, Eckfeldt J H, Leppert M F, Province M A, Mockrin S C and Hunt S C. NHLBI family blood pressure program: methodology and recruitment in the HyperGEN network. Hypertension genetic epidemiology network. Ann Epidemioll O: 389-400, 2000.
[0244] 18. Ewing B, Hillier L, Wendl M C and Green P. Base-calling of automated sequencer traces using phred. I. Accuracy assessment. Genome Res 8: 175-185, 1998.
[0245] 19. Nickerson D A, Tobe V O and Taylor S L. PolyPhred: automating the detection and genotyping of single nucleotide substitutions using fluorescence-based resequencing. Nucleic Acids Res 25: 2745-2751, 1997.
[0246] 20. Stephens R M and Schneider T D. Features of spliceosome evolution and function inferred from an analysis of the information at human splice sites. J Mol Bioi 228: 1124-1136, 1992.
[0247] 21. Nakai K and Sakamoto H. Construction of a novel database containing aberrant splicing mutations of mammalian genes. Gene 141: 171-177, 1994.
[0248] 22. Rogan P K, Faux B M and Schneider T D. Information analysis of human splice site mutations. Hum Mutat 12: 153-171, 1998.
[0249] 23. Schultz J, Copley R R, Doerks T, Ponting C P and Bork P. SMART: a web-based tool for the study of genetically mobile domains. Nucleic Acids Research 28: 231-234, 2000.
[0250] 24. Rebhun J F and Pratt J H. Molecular cloning of Nedd4 from Xenopus laevis. DNA Seq 9: 295-306, 1998.
[0251] 25. Makalowski W, Zhang J and Boguski M S. Comparative analysis of 1196 orthologous mouse and human full-length mRNA and protein sequences. Genome Res 6: 846-857, 1996.
[0252] 26. Plant P J, Yeger H, Staub O, Howard P and Rotin D. The C2 domain of the ubiquitin protein ligase Nedd4 mediates Ca2+-dependent plasma membrane localization. J Bioi Chem 272: 32329-32336, 1997.
[0253] 27. Plant P J, Lafont F, Lecat S, Verkade P, Simons K and Rotin D. Apical membrane targeting of Nedd4 is mediated by an association of its C2 domain with annex in XIIlb. J Cell Bioi 149: 1473-1484, 2000.
[0254] 28. Ikonen E. Roles of lipid rafts in membrane transport. Curr Opin Cell Bioi 13: 470-477, 2001.
[0255] 29. Snyder P M, Olson D R, McDonald F J and Bucher D B. Multiple WW domains, but not the C2 domain, are required for inhibition of the epithelial Na+channel by human Nedd4. J Bioi Chem 276: 28321-28326, 2001.
[0256] 30. Dunn Rand Hicke L. Domains of the Rsp5 ubiquitin-protein ligase required for receptor-mediated and fluid-phase endocytosis. Mol Bioi Cell 12: 421-435, 2001.
[0257] 31. Vogt V M. Ubiquitin in retrovirus assembly: actor or bystander? Proc Natl Acad Sci USA 97.: 12945-12947, 2000.
[0258] 32. Hicke L. A new ticket for entry into budding vesicles-ubiquitin. Cell 106: 527-530, 2001.
[0259] 33. Kikonyogo A, Bouamr F, Van a M L, Xiang Y, Aiyar A, Carter C and Leis J. Proteins related to the Nedd4 family of ubi quit in protein ligases interact with the L domain of Rous sarcoma virus and are required for gag budding from cells. Proc Natl Acad Sci USA 98: 11199-11204, 2001.
[0260] 34. Strack B, Calistri A, Accola M A, Palu G and Gottlinger H G. A role for ubiquitin ligase recruitment in retrovirus release. In: Proceedings of the National Academy of Sciences PNAS, 2000, p. 13063-13068.

1. An isolated nucleic acid sequence comprising a nucleic acid sequence encoding a NEDD4L gene product having a Ca²⁺-dependent lipid binding (C2) domain, or a functional fragment thereof, wherein said functional fragment thereof comprises the Ca²⁺-dependent lipid binding (C2) domain.

2. The isolated nucleic acid sequence of claim 1, wherein the nucleic acid sequence encodes a NEDD4L gene product selected from the group consisting of SEQ ID NO: 188, SEQ ID NO: 190, SEQ ID NO: 192, SEQ ID NO: 194, SEQ ID NO: 198, SEQ ID NO:202, and a sequence having 95% identity thereto.

3. The isolated nucleic acid sequence of claim 1, wherein the nucleic acid encoding the NEDD4L gene product encodes a protein selected from the group consisting of SEQ ID NO: 182, SEQ ID NO: 186 and SEQ ID NO: 190.

4. The isolated nucleic acid sequence of claim 1, wherein the isolated nucleic acid is a cDNA or a PCR product.

5. An expression vector comprising the nucleic acid sequence of claim 1.

6. A host cell comprising the nucleic acid sequence of claim 1.

7. The host cell of claim 6, wherein said host cell is selected from the group consisting of E. Coli, Bacillus sp., Streptomyces sp., yeast, fungi, insect cells, plant cells and mammalian cells.

8. An isolated nucleic acid sequence comprising a sequence having at least one variant selected from the group consisting of variant 1, variant 2, variant 3, variant 4, variant 5, variant 6, variant 7, variant 8, variant 9, variant 10, variant 11, variant 12, variant 13, variant 14, variant 15, variant 16, variant 17, variant 18, variant 19, variant 20, variant 21, variant 22, variant 23, variant 24, variant 25, variant 26, variant 27, variant 28, variant 29, variant 30, variant 31, variant 32, variant 33, variant 34, variant 35, variant 36, variant 37, variant 38 and a GT microsatellite polymorphism linked to NEDD4L, wherein the sequence is useful in the diagnosis of hypertension.

9. The isolated nucleic acid sequence of claim 7, wherein the isolated nucleic acid is a cDNA or a PCR product.

10. The isolated nucleic acid sequence of claim 9, wherein the variant is variant 13.

11. The isolated nucleic acid sequence of claim 10, wherein the nucleic acid is a PCR product less than or equal to 1000 nucleotides in length.

12. The isolated nucleic acid sequence of claim 7, wherein said isolated nucleic acid is a cDNA.

13. An isolated polypeptide comprising NEDD4L having a Ca²⁺-dependent lipid binding (C2) domain.

14. The isolated polypeptide of claim 13, wherein NEDD4L is selected from the group consisting of SEQ ID NO: 182, SEQ ID NO: 186, SEQ ID NO: 190 and a sequence with at least 87% identity, or a functional fragment thereof, wherein said functional fragment comprises the Ca²⁺-dependent lipid binding (C2) domain.

15. The isolated polypeptide of claim 13, wherein NEDD4L is selected from the group consisting of SEQ ID NO:188, SEQ ID NO:192, SEQ ID NO:194, SEQ ID NO:198, SEQ ID NO:202, and a sequence having at least 87% identity thereto.

16. The isolated polypeptide of claim 14, wherein the sequence with at least 87% identity has at least 95% identity.

17. The isolated polypeptide of claim 15, wherein the sequence with at least 87% identity has at least 95% identity.

18. An antibody or antibody fragment specifically recognizing the polypeptide of claim 13.

19. The antibody or antibody fragment of claim 18, wherein the antibody recognizes an epitope comprising the Ca²⁺-dependent lipid binding (C2) domain of NEDD4L.

20. A method of treating a subject thought to be in need of treatment of enveloped viral infection, hypertension or hypotension, said method comprising:
administering a therapeutic agent capable of reducing an amount of one or more isoforms of NEDD4L protein to the subject.

21. The method according to claim 20, comprising providing a nucleic acid encoding NEDD4L operably linked to a promoter; and expressing the nucleic acid in the subject.

22. The method according to claim 21, comprising administering to the subject a nucleic acid encoding NEDD4L having a Ca²⁺-dependent lipid binding (C2) domain.

23. The method according to claim 20, wherein the therapeutic agent comprises an antibody or antibody fragment.

24. The method according to claim 23, wherein the antibody or antibody fragment recognizes an epitope in a Ca²⁺-dependent lipid binding (C2) domain of NEDD4L.

25. The method according to claim 20, wherein the therapeutic agent comprises an antisence nucleic acid sequence.

26. A nucleic acid sequence for identifying sequence information about a NEDD4L gene, comprising a primer capable of providing sequence information about at least one variant selected from the group consisting of variant 1, variant 2, variant 3, variant 4, variant 5, variant 6, variant 7, variant 8, variant 9, variant 10, variant 11, variant 12, variant 13, variant 14, variant 15, variant 16, variant 17, variant 18, variant 19, variant 20, variant 21, variant 22, variant 23, variant 24, variant 25, variant 26, variant 27, variant 28, variant 29, variant 30, variant 31, variant 32, variant 33, variant 34, variant 35, variant 36, variant 37, variant 38 and a GT microsatellite polymorphism linked to NEDD4L.

27. The nucleic acid sequence of claim 26, wherein the at least one variant comprises variant 13, wherein position variant 13 is nucleotide position 82,773 of chromosome 18 of hg8 as disclosed in a Aug. 6, 2001 freeze with coordinates indexed to base 65,000,000.

28. The nucleic acid sequence of claim 26, wherein the nucleic acid sequence is a PCR primer.

29. The nucleic acid sequence of claim 26, wherein the nucleic acid sequence is an allele specific probe.

30. The nucleic acid of claim 26, wherein the GT microsatellite polymorphism linked to NEDD4L provides information about a polymorphism showing linkage with the variant 13.

31. The nucleic acid of claim 30, wherein the polymorphism is selected from the group consisting of a single nucleotide polymorphism, a restriction fragment polymorphism, a dinucleotide polymorphism, a trinucleotide polymorphism, a deletion and an insertion.

32. A method for diagnosing, prognosing or treating hypertension or enveloped viral infections in a subject, the method comprising:
obtaining a sample from a subject;
analyzing in the sample from the subject whether the subject is capable of producing a NEDD4L gene product having a Ca²⁺-dependent lipid binding C2 domain; and
diagnosing, prognosing or treating hypertension or an enveloped viral infection in the subject based on the capability of the subject to produce a NEDD4L gene product having the Ca²⁺-dependent lipid binding C2 domain.

33. A method according to claim 32, wherein analyzing the sample from the subject comprises assaying for the presence or absence of a NEDD4L protein having a Ca²⁺-dependent lipid binding C2 domain.

34. The method according to claim 33, wherein the NEDD4L protein is detected by immunoblotting, immunocytochemistry, enzyme-linked immunosorbent assay or affinity chromatography.

35. The method according to claim 32, wherein analyzing the sample from the subject comprises introducing a probe into the sample under conditions suitable for hybridization of the probe to a gene or mRNA sequence present in the sample, hybridizing the probe, and assaying hybridization of the probe.

36. The method according to claim 35, further comprising isolating genomic DNA or cDNA nucleic acid sequence from the sample.

37. The method according to claim 35, comprising hybridizing the probe to a mRNA sequence present in the sample.

38. The method according to claim 35, comprising providing an allele specific probe.

39. The method according to claim 35, comprising analyzing position variant 13.

40. The method according to claim 32, comprising determining an absence of NEDD4L protein having a Ca²⁺-dependent lipid binding C2 domain, wherein the absence is indicative of a vaso constricted condition.

41. The method according to claim 32, comprising diagnosing, prognosing or treating hypertension and selecting an appropriate antihypertension medication.

42. The method according to claim 41, wherein selecting an appropriate antihypertension medication comprises selecting a plasma volume reducing agent.

43. The method according to claim 42, wherein the plasma volume reducing agent is a diuretic.

44. The method according to claim 42, wherein the diuretic is selected from the group consisting of furosemide, bumetanide and ethacrynic acid.

45. The method according to claim 41, wherein selecting an appropriate antihypertension medication comprises selecting a drug having vasodilator activity.

46. A method of detecting interaction between NEDD4L and another molecule, the method comprising:
assaying for a binding interaction between a NEDD4L protein having a Ca²⁺-dependent lipid binding C2 domain and a binding partner capable of specifically binding the NEDD4L protein.

47. The method according to claim, comprising assaying for a binding interaction between a NEDD4L protein selected from the group consisting of SEQ ID NO: 182, SEQ ID NO: 186 and SEQ ID NO:190.

48. The method according to claim 46, further comprising determining a cellular localization of said binding partner.

49. The method according to claim 46, wherein the binding partner is a lipid.

50. A kit for identifying information about a NEDD4L gene or gene product, comprising:
at least one a probe or antibody, or antibody fragment, capable of determining the presence or absence of a NEDD4L Ca²⁺-dependent lipid binding C2 domain.

51. The kit of claim 50, wherein the probe provides information about a position variant selected from the group consisting of variant 1, variant 2, variant 3, variant 4, variant 5, variant 6, variant 7, variant 8, variant 9, variant 10, variant 11, variant 12, variant 14, variant 15, variant 16, variant 17, variant 18, variant 19, variant 20, variant 21, variant 22, variant 23, variant 24, variant 25, variant 26, variant 27, variant 28, variant 29, variant 30, variant 31, variant 32, variant 33, variant 34, variant 35, variant 36, variant 37, variant 38 and a GT microsatellite linked to NEDD4L.

52. The kit of claim 50, wherein the position variant is variant 13 at position 82,773 of chromosome 18 of hg8 from the August 6,2001 freeze with coordinates indexed to base 65,000,000.

53. The kit of claim 50, wherein the at least one probe comprises at least on primer, wherein the at least one primer provides direct sequence information about variant 13.

54. The kit of claim 50, wherein the at least one antibody or antibody fragment recognizes an epitope derived from a Ca²⁺-dependent lipid binding C2 domain of NEDD4L.

The application's sequence listing, which the Patent Office published only in electronic form, follows.

SEQUENCE LISTING (202 sequences)

SEQ ID NO: 1 - DNA, 1080000 bp, Homo sapiens
  allele (825234): the 'n' at position 825234 may be 'c' or 't'
  allele (825270): the 'n' at position 825270 may be 'c' or 'g'
  allele (825401): the 'n' at position 825401 may be 'c' or 'a'
  allele (825428): the 'n' at position 825428 may be 'g' or 'a'
  allele (825473): the 'n' at position 825473 may be 'g' or 'a'
  allele (825765): a "c" may be deleted at this position
  allele (825828): the 'n' at position 825828 may be 'c' or 't'
  allele (826041): the 'n' at position 826041 may be 'a' or 'g'
  allele (826546): the 'n' at position 826546 may be 'a' or 'g'
  allele (826654): the 'n' at position 826654 may be 'a' or 'g'
  allele (826826): the 'n' at position 826826 may be 'a' or 'g'
  allele (826863): the 'n' at position 826863 may be 'a' or 'g'
  allele (827008): the 'n' at position 827008 may be 'a' or 'g'
  allele (843055): the 'n' at position 843055 may be 'g' or 'a'
  allele (843118): the 'n' at position 843118 may be 't' or 'c'
  allele (871027): the 'n' at position 871027 may be 'a' or 'g'
  allele (871140): the 'n' at position 871140 may be 'c' or 't'
  allele (871168): the 'n' at position 871168 may be 'c' or 'a'
  allele (872678): the 'n' at position 872678 may be 'c' or 't'
  allele (872742): the 'n' at position 872742 may be 'a' or 'g'
  allele (925859): the 'n' at position 925859 may be 'c' or 'g'
  allele (993220): the 'n' at position 993220 may be 'c' or 't'
  allele (993254): the 'n' at position 993254 may be 'g' or 'a'
  allele (1006462): the 'n' at position 1006462 may be 'c' or 't'
  allele (1007820)..(1007823): "ttct" may be deleted at this position
  allele (1018038): the 'n' at position 1018038 may be 'a' or 'g'
  allele (1018704): the 'n' at position 1018704 may be 'c' or 't'
  allele (1018718)..(1018720): "gtt" may be deleted at this position
  allele (1026786): the 'n' at position 1026786 may be 'c' or 'a'
  allele (1047134): the 'n' at position 1047134 may be 'a' or 'g'
  allele (1047159): the 'n' at position 1047159 may be 'a' or 'g'
  allele (1047378): the 'n' at position 1047378 may be 'c' or 't'
  allele (1047739): the 'n' at position 1047739 may be 'a' or 'g'
  allele (1050133)..(1050137): "ttaaa" may be deleted at this position
  allele (1050539): the 'n' at position 1050539 may be 'c' or 't'
  allele (1062808): the 'n' at position 1062808 may be 'c' or 'g'
  allele (1066392): the 'n' at position 1066392 may be 'a' or 'g'
  allele (1073711): the 'n' at position 1073711 may be 'c' or 't'
tattgtttttaatttagtttggctttagacacatggttcaacttggcctagttaggtctgggatttactggtgcctctcattcatttcatcatgttgattaccactggctttttccaaattctgttcttcatagtaatatgtggctctactttggttctcccatttcctttgatgacgtgttaatattgaagggcaaatggaagccctagttctgaatgttatgatccatgattgcccctctgtcatatccagtgctggtaggctgtgaagatgggccgggggagatgttgtcagcaatcaggggtaggcatggcaaggactgtggaaacagacctggctgagggtctgtctccaggatataagtgagccaaccaatggccaggagccaagaggcatggccaggtggtctccttgcaggtccgagaagtctcaatctggttggtggaggctgtttacagagctgaatccacaaggagattggatgagattgagtgcaaggttataggctcaatatggaacaggaggtccaggtggggaaactgaggcagagtccagtggtatgggctaggttaatatgggaaagaagggggcaaaactgtttatgtgagatctgttccatccttggcagctaacctaattctgcccttctaggctgatgtgccaggtttgcctcagtcaggatcgtctgttgtctggatcagggctgagcacatggatagccatggctcttgctcaggagtgcgatggaagaagtggctaatagcagcaatttggggagcccattatgtgagcatcagaccttccccagatacccccacctcactggtggtgaggagttccccatatgttgccagaggagtctggcggggactctaacagtgatggtcctttattacctgcagtttggcagggaaggaacaggcaggaatagaccaagcttcctataaagatacaaatacatcacctcaaagactgacccattaaacgattgtaacttctaacatcttagtctaatccagcttctcacattaacagcttactctcatcaagtccccaaaaagaatggaagccaggacagatgagcttgataaagatggcaatggttctcagccctggtgagacattagaatcatgcgccccagtcccaaagttctgaattaattgatcttgtgggggacccggtatatatttttaaagtctcctgggcagttctaatgtgtagttggagtagcaatcctctgatttagggcactgtgcacttccagggggagggagggagtatggaacaaaggagcccagagtaaaaggaggtcatgggaggctaggaaagcctcctcccacccaaagagtttgcccagtgtctgtcctgcttttgggtctttaggccacttctaaatcttttcacttctaattattccccagcaaatcccacctccttccccaggtcaaagcagactgctataaaggaaaaaggagtggagtggaccaatgtctctttgttaagaaagttccacaagctttgttttactgctttatttggagtctgattttttaataagacggggcaaaaatgggcattagtatttgtattagtccatttttatgctgctgataaagacatactcaagatggagcaatttacaaaagaaagaggtttaatggactcacagttccacatggatggggaggcctgccaatcattgtggaaggtgaaaggcacatctcacatggcagcagacaagagaagagaacttgtgcagggaaattcccctttataaaaccatcagatcttgtgagacttagtcactatcatgagcatagcatggaaaagactcacccccgttattcaattaccctccactgggtccctcccacaacacatgagaatcatgggagctacaattcaagataagatttgggtggggacacagccaacccatatcagtattccacacatccacagaggtacccctggtattcaaggaaaaacagcacaaagaaacagaccactcacattaggattatattgggtgctttttttcacccctaacagtgtttttgtaattgaaatcattaaatgggagcattaaaagggcccttcaaggccatctggttcagcccatgcaccccatgaggaatcagcagggctgcattcaggagcattcaggaatttacctttaccccaacctgagtttcaatcccagcttggctacttgctagctgagccaccttgggcatgtaacttatgttaagtttcctcagtttacttgtccataaaatgggactcatgatacctacctccacaataccacagagtggttgtgaagaaaaaatgagtcaatgacaaatattaatccacttcccttattagaattttgaatactgaatgtgatatttgatcctcccaccatcaccacacacaacagcattttagcaccatcaatttctgtcattagcatttgggatgttctgtggtgtcaacctcatttgatgaagttgactaatgggctacctaggtagaagcagaaaatatcttctcctagcagtttgccacagtgacaggaaattcatcatcattgctatgccttaactagaaagcagtactgtttaaaaaaaaacatggaagggggcccacactcggagtcaaaagaattaggctctgatcccagttccacaaatgtgtagctgtgtgatcttgggcaaacaacttaaactttctgagcctcggttttctcatatgacaaaacttgctctgcccacctagatatgataagggccaaatgaaattgtatatggcagcagttcccaatcagtagcaattctgcctccacccgacccgaggtacatttgacaatatctggagacacttttgattgtcacaactagtgagtagaaggaagggaagctgctaaacaaacatcctacgttgcagatgacagcctcccacaaagagttatcctgtccaaaatgtcaatagtcctgtggttgagaaagggctttgtaactttgagaggctcaggtgtcattcttaaacaacaagtacctatgaggaggttcacagtggctttcagagtcattgccaccttcgttcagctaatttctcagacccctttccaacaggacacagaactatgcggagggcacacccctctaagaagccttgctcagggcaaaagtgcagggcttagcaggctggcccctgtggagggcaggtctcccgccagccagggacacttagaagggttgtgagcatggggaggtttaacccagcatcttcatgtaggtttttcaaagatgcctcaaacccaacatgactcatatcaaattcatgttcatcccacattcactccttctccatggttctctgcatcagcaaatactaccacccttcatccatgagtttgctcaggccagaaatccaaatatctatggattccatccacttctctatatcacctattctctctttctctctctctctctctctctgtgtgtgtcacacacacacacacacaaacacacacacgctgcttaaaagccattcaaaagcttttccgataaagaccaaaatttttaacacagcctggcctctggcctgactctccaactttatttattaccattctcctcacccctgatgctagccaatcagttgtggcttattttagctctttgaaaccaccatgccacagggcctttgcacattcttaccttattcttagacactctcccattttcttgccctaattaactcctatgcttcctgcagatttcagcttccagcttcagcttccagtcattacattttcagggaactgttttctgacctccttgacaagccagttccctctgttatccctcttgtgaccaccacctctcctccataacccctaccctgctggtagtttacatttgtaaaagtcttggatcaaagtgtatctccctcactaaagaaaacattccaccagatttgctaactatcatattcaccacatagcacacagtgccttccacatagcaagaaatgtataaatatttgttgaatatgtgaatatggataccaaaggcaaatttgaggccaactataaaacaaacaaacaaaaggcagaaaaaacactcttaggttcattttaatttttgaaccccttttgtgccaagactagcttttggcctaatggaatatttttatgctaaaatgtctgaaatgctgtctgatgcctctgagcacacttaggcaaacatttctggtacaaagagagattatcaggcaatctgccttccctagcaccaaatactgttttccttgggcacgtcccagcagctgctgataaatctgcagacagtccttctcaatgatctttgtctcccagctttatcaaggcagcttctaggaacaatgctcctactcagctatcaggctggtcctacataggggtccattttggagactctccttaaagttatctgactgcactgcgctttcctcatctgtgaaatccataactagcaacaaggcaggaaccaggctctgcccaccaaggcccatgggggtggctctgcaggtgaggggatgattcttccatctcctgtgtggtggagcccccaaagggagcccaggccttctctctgcgttctactccaaagggcagttctcagatatagcaactgtgagtgatatatttttattttcccggaaaaatactgagcttctgttcaaatgagatttaagccaacatgaaagatggaatgtgctattttttttctttcctaaggtcctcgatgtcacatccagcaaaagcaggttgcccatattgtggtaattattgtctaagctcttattttgaacaaaaggaaattgtgtgtgtgtgtgtgtgtgtgtgtgtgtgtgtgtgtgtgtgtgtgtgtgacagagagagagagagagagagagagcaagagagcaagagagagagagattgacctggggaaggagaggcaaggagggagaaagaaaggaaatagaaagaagagagagacagcagagacagaaagaggaatgatgaagggaaagaaaagggagttcattccagggaattttttttattaaattccaacacgaggaagctctgtgtacatgggctccccgttttctccttctgaagcctgaaggcaaaccaggatgctgtgtcaattacagaaaaaaatcaatgaagatactgttcaggagtccttttcaccattcagtgcggatggtatccttcactttctagcactgattcattgactttcagcctctctgggggctgctgacatattgctatctctgaagaatctgaagcaaaatcacctttgtttcctactgcaacttgttcctccgtgcagttcgttagaggggccaccacatgacctccctcggctcgtaggactgaagggcaagaccttgctgggctcgccatgggctttggtgcctccctccatcaacctgccatctcccccgctgaggcacccagggcccagtcaggcctcctgactgtaggctgagagcctcataaattttcaaacactgtttcctctactgtgtctattctgactctaaaacaaattcctgctccagtactagtaccctcctagctcaatagcattgtagaagacatcttctaaagaaataaaacctattccaaagcaatggcattgatgaaggaagcccaggcattaagacacagaacatccctggagcaggcactggaagtgaggtatggagccatctgcacaactggatttccactacgacagtgccattcatttgagttaagtaatgcccttctcttttggccccattttagattttgaacatttctttttttttttttttttttttttttgagacggagtctcgctgtcgcccaggctggagtgcagtggcgcaatctcggctcactgcaggctccgcctcctggggttcacgccattctcctgcctcagcctcccgagtagctgggactacaggcgcccgccacctcgcccggctaattttttgtatttttagtagagacggggtttcaccgtgttagccaggatggtctcgatctcctgacctcgtgatccgcccgcctcggcctcccaaagtgctgggattacaggcgtgagccaccgcgcccggccgattttgaacatttctagagaggttaagacttcagtccttgtactagtttcttattgctgctgtcacaaattatcacagtcttacagcttaaaacaacaaaaacttattctctctcaagttctagagttcagaagtccaaaatgggtcagcaggactgcattctttctggaggttctaggaaaggattcatttccttgctttttctagcttctagaggccacctgcattccttgactcatggtcttctctctccattttgaaggccagcacatagcatcttccaacatagtgctctctctcttgctctctctctctctctgtcatcacatcaccttttctggctttgcttcctttgtcacatctccttctctacctttaccttcttatgaggatcatgtgattacatcaggcccacccagataatccaggataattttcccaactcaaaatccttcaataaatcatacctgtgaagtcccttctacctataaggtagtgtgttcacaagttctaggaattaagacatggacattcgggaaaggcattattctgtctgctacactccctgactttttagtataagcaaataaggccacccaatttcttcccagttggtgacagagatcagtggagagacacaggagtcaggtaagaggggaatggtgtgcactaaaaagggggcaaagagtacagagttgagaggtagaggtggtatagcattgatttcattgatttttttttcctgactttatgagtcatgtagaaggattgtcagctaaaatggtgctgtaaatttatggtgtgcattctctccaccccacctctattcaaacacaacgatgacagaaaaagtgaaatctaatttaaaaaatttaaaagacacaaaacatccccacggaccaggaacagaaaaaaacagaaacatggttaaagcaccaggcttgctgggccttgagttcgaaaggatgtactcgttactgagcaaccaatgagctgacagctgcctgacgtgaagccaataccatggcatcagcttttgagcaaagaaaagctttattgcaagtcaactggcagcggacaggaggaaatgctcaaatctgtctccctgagctgggagctgggactggtattacaagcatagcataatgagatgtgatctgattggatcttataatgagatgataccagggctccatatgattggatcctgaatcctgtcattcagtgtctccttcttaattcagttcttgcgcctccatcttagcacttaggttctgcccatggtttcatacatggttcatctgggcatgttccaattacatgagcttcaacgtggaggtctgtggcaactgcaaaacaattcacagctttgtcacataaaagtttaactagattggtctggtgtggctacatattcagtcaactaagagggtggttcctgtggagataaaggggcccaaagttccacgaggtgaggctgaccctgaaaccagagatgggttgggggttccctgcttgtgaaagggatacgaaaaagctttctagctaccccggccaggggctgatgctgagttgaagctgtgcacacctagggaggcagagagaagcaggcttcacaaccaagacctaggccaagccacccactggctcgatgaacacttttgagatattggcaatattatcgtgcgctgggattctcaagccaacaattatttagttctgatagggtgttccaaaggtccaaactgctagacagaacgatcattctggttattactgttgcatagcaaatcacccaacaattctgtagggtaaaacaagtcattttactttgctaatgtattctgtagcttaggaatgcagacagggcatagcaaggatgtctagagcctctgttggaggtgactcaatggctggagtcaccacctggaggcacatttgctcacatatctggaggttcatgctaattcaagacgttagctgagctgttggttgccctctacatgtgttctctccatgagggctattttggccttcctgatagcgtggtggctgtgttccaaaagtgagagtgagcatcccaagagagcaacgtggaagtgtacggcatttcttttcttttttctttttttttttttttttttttgaggcagagtctcgctctgtcgcccaggctggagtgcagtggcacaatctcggctcaccgcaacttctgcctcctgggtttcaggtgattctcctgcctcagcctcctgagtagcttgcattacaggcacctgtcaccacgcccagctaatttttgtgcttttagtagagacggggtttcaccatgttggtcaggctggtcttgaacccctgacctcaagtgatccatcagcctccgcctcccaaagtgctgggattataggcgtgagccaccgcgcccagccagtgcatggcatttctatggtcttgactcagaagtcacagtgtcacctcatcataatctattgattgaggcagtcacaaaggttggtttaggatcaatgcgagtggacatagaccccatcacttgtgaggaccattagtcagattccaacacaagcatgtaagatgggaagtattttttgcctaataacttgctgagaagttttgagatatcagaaatattattgtgggttggaatccccaagccaacactccaacacttagttctgattgagataccccaggaggcaagtagagatacctactaaagtattagatagagttagccatagaggatgggagggaaaacttccgcctcactcaaaatgagtctgcaaactaatagtccaaaatccgaaatgtaaataatctaagaaagctaaccagaaaaatcaacaactgagagatgaaatcacttcacaaaaaaattaaaataattgagcaataagaaaatgattttttattaaatacttctgtgataatatcctgaaacaatgaaagaaatagcatctttaaaagtaatgagattatcaaattagaaagcagaattaatcaaaataggtgattataaaaggtaactgtagaaatcttgaaaaataaaccacaatggatgagatagctctaaacttgatatggtgaaaaagataattagaaaatttaaatataggacaaaataatttgctcataatatacaacagagaaaaggatgaagacatttaaaaatggttaaggggacagtttcagttgtggtaatagtattgtagcttgtttcagactctctcacacataacaattataaactctgtaaaaaatattaaaacaaacacttgaagacactgaagaacaaccaaaagcaggcaaaatctgaaagagatatgtcccttgaaaggcggaagccatgttggatgacatatagccattttcagttgagagcagactccagtccatacagtgaagagtcaccagatctcaagcagaaagctgcagtcttattgacttcaggtgtcagaggatagagttccagggcagctggaaattagagaagcaaatcctggaaaggagggagccatggcatgaggtgccaaaaatctgcatacaaactccccttaaattattggctcacccctaaaatgcatattcacaataaggattctaaaaagacaagcaaaaatcaagttgaaatggtaaaataactaagcagagatatcggatgcccaccccaagagagtgagagctatcaagttgggaagtcttgctaaacaccttgagctttatacagacactccctcttactaaaggcaaaaccatgcctccacatgttcaaagtgatgagtcagtgatttaactccatgttagaattcttcagaggagggtcacagaattcagagtcaccacaacatatcatcgcagtgtccaacatgctatcaaaaatcattaagcatgtgaagacacaggaaatgtgactaatagtaaaaaaaaaaaaaaatgtcaatagaacagactctccctccaacccccagccccaatgattcaggaaatttgattaaacaaattttgatatttttctacagtaaaggtctactcagcaaaaggaaaaaaatggactactaatacatgcaacaacatggttgaatctcaaaaacactttaagtgaaatagaccaaacacaaagatatatgctgcatgattccatttatacaaagttttttttttaattttatcattattatactttaagttttagggtacatgtgcacaacgtgcaggtttgttacatatgtatacctgtgccatgttggtgtgctgcaccccatttatacaaagtttgagaacaggaaaaaacaactaccctgtgatgaaaaaaatcagaacagttttccatgagaaatgagaattgactaaaaggaagcataagaaaatgttattgaagatggaaatgttcttaattttgattgggattgtggtttcacaggtacgaattttacctcacagtacgaattttcacagtgtacgaattttacctcaatttcacagtgtacgaattttacctcaatttaaaaagtaaaagaatagttgggaaacagaggatagattgaaaaatttgaaaacatatgtaatcagaattctagaagaactgaagaactgatggcaagacaacattcaaagaggaaatggctaagaattgttgagagatgttgactcctcagactgaaagtgtacaccaagtgccaagcacaataaacaaagataaatcccacttagacatagcatcgtgaaactgcagaacattaaagataacatcataaaagctatgagaaacagggagaaagaaaagattttctacaaagacatgctcattaaactgacctcaatcttttcatcagcagcatggatgccagaatacaagtgaacaatatcttcaaagtgttgtaggaaaatgtaataaaagccatataccttgctaagtaccatataccttctagagtcagggcaaaataaagacttgttaaatataaaaaactaatagtttttttaaccactcacatgcttcctgaataaactactaaaggacattttccaacaaaaagaaaagccaaattagaggcaaggtgtggggctaaccagaaaactcagaaatagcagaacatattggcagccaccactagctagtaactacagtcagtcaaagacaattttagtattttaagaggtaattaatgtaaaagtaacataatgaatgttcattgtagaaaatttaaaaagtacagaaaattataaagtataaaaaccacccaaagtccagcactcagagatcacattgctgtttccactagccatgtacccataactgagaacctgtaccagtgtatgttcttttcaagaagatatttaatgatatgcattattacattagatgattcttccacaatggatataaacaatctgcctttcgatttgtccctgtatttactattttccataatgttgctataaaaatctttgtgcatacatttttgtatgcgttactttgctagatccctagcaaaggcagttctgtaaattctgtccattgtagaaagacctggccttattggagcagatggagcattcagttcctctcaaatgaaaggcatctggggagtataaacaaccctgtactgagaagccaagatgggattttgaatctatcctttcgctgaccaggccaatcaattgcttctctgggctccaggatcctcatatgtaacaacgaagttgggtagagcgtttggcaggtcccttcctgctgtaaccttctacaccacacaggcagatatcctgttcaaaccgccaataataaggcctgatcatgtccaaaagagcccccctttccccagaaaaaagtctggctctacaacaatggaaaacttctccctagtcccagctcccagggcaagtgacactatgaggcaagagctgcttgcagagagaggggaagctgaaaccgcacccctgggtgggatcagatttccccagtaaagactgacctcaacacccagaatgtgctcctggcccagggtgctgtgctggaggccaagtcggcttctctgacatgcttgccggggctagagttggcctgtctcctcggcctgtggcccttcaggctgaacagacccacagcaatgttctggtgcagcgcttcccacaagcagaagatagaagacaaatccctgaggtctgaaaatcatgcataaaaagacctacagcaaaagagaaaaatctgtttttcactttaaaatgcatgtgctttttctaccttattccataaagtttctgtatttatttgagtgtagaaaacgtttcccccactcttcaagtaaaattgatatcccccagaagatgaaccacattcactgtgtggcttaaaataaccccagcacacacaacatccccgaccagtggaaagcgcaagtagctgggttagagaagcaggactctcctctgccccgcaccctctgtgcttgctgtcagtagcctggctgtcctcaacctcagcactgtttccagtcctcagcctgggagctactcaatttgtctctcctgtttttttcagtggtcgcattttgaagatgctagatgtattattccgaaaaccagctgtccctaaatgagctatgcctccaagtaactccatagttggtgataggatgtttcctggtataggtgtattccacataagtgaaaaaaaatagattatcatcatcttgcaaccctctaatgaattaaaagatctgggtcatgatcatcaatggcagctcacaccaaaagggagacaacaagacaccctgggacttctgacgcagcaccgcctataaagtacgccaggctaacaacaaaaaacaagcctgaatctgaagaagtttcgcaatccaactaccagtgtgcaggaaatacagaggaatctgttaaatgacatcagtgcaatcagtgagatccacagcaaaacatccaatttcctcaatagtaaattgtaaaggggtgaaaaagagaaagagggaaatctatgaactaaaaagagatatcaagcacatgcaatctatgagtcttacatgttctgatacaaacaaactcactatttaaaaatcactggctgggtgcggtggctcacgcctacaatcccaacactttgggaggccgaggcaggcggatcacctgaagtcaggagttcgagaccaacctggccaacatggcaaaacctcatttgtactaaaaatacaaaaattagccgggcgtggtggcgggcatccctagttccagctactcaggaggttgaagcaagagaatcgcttgaacttgagaggcggagattgcaatgagctgagatcgtgccactgcactccagcctgggcgacagactctgtctccaagaaaaaaaaaatgatgcgttcagtgggtacagagtttcagtttgggataatgaaaaaaagctctggagatagatggtggtgatggttgcacaacaaggcaaatgtagtcaatggtattgatctatacacttaaaaatgggtaaaatggtatatttcatgttttgtataatttactacagtaaaaattgtttttcattttttaaacgatttatttttctaactacatgctagtatgtaaaaaaaagtttatgaaactactaggaaaatttgaacactgactagatatttgatgatagtaatgaattactagggctgtattttatgtgtctttatcttttagagatatatataaaggtatttatggattaaatgatatgatggctgtgatctgctgcagattaatccgatgctggtggagggggtggtataagttatataagagtggccaggaattggtgactgttgtagctgatgatggatacaggggtttattgtatatttgaaatgttccctagtacaaagtttttaaaagaagactctggccttgtatagtttacatttgtctgtgagaaaataaataaaatatttagaatatcagctagtgataagtgttaagaagaaaacataagtcaggaatataggaggaggtgcaggctggaaatataagtttggaaattttcagcatgtataaatgcttaaagtcctgagctttgaatgagccatggttacgttcatctagggaatgagtataaatagaaaatagactgaattctgaactctggggtcctcagacctctggctgagaggttggagaaatgaggacaattcaaaaaataattctgaaaagtcagtgagggagcaggaaagcccgtagtagcaggaagtccctaaatccagagacaaacccatttcaaagagggagtgatcacaaatgtccatttatgctcacagcctagtaaattcagtactgaagatgggccattagatttagcatctaaatatctgacctcatgctcctcccggcttctgatctccagctggagtcttgcatgattgaatccagtctagagccagagggcaaggaagcccacagaggcagtccagaatggagagggcctatgggagagcacccagaagacagctgtcacaggaatcttgcctccttcaatccccatccttttggagcacagagttcagaaatgtagggactgtgtttcattagagccagagtaaagctatcatcaccatcttcatcttcttcattctcatcgtcattcttgtttacccaaaaggaatcttaatcattcaaggtgccttgtttcactgtggcagagccaggataacatcccaagcctttggactcctggttcagtacattgcaccatcttccccaacatctccccagtcaccctgctcctgtgaccacatggatgatttacctttattcatcagttaacccattctcatggctggaagtttacaataaggacccctgcacagaaatcccccaagtctgcacactctgtagctgtttgttctttctttttttttctttttttttttttctttctttgtttttttttttttttttttttgacagagtctcactctgtcacccaggctggagtgcagtggggcaatctcggctcactgcaagctccctcccaggttcacaccattctcctgcctcagcctcctgagtagctgggactacaggcacccgccaccacgccccgctaattttgttttggtatttttagtagagatggagtttcaccatgttagccaggatggtctcaatctcctgatctcgtgatctgcctgccttggcctcccaaagtgctgggattacaggcatgagccaccagtccgggcccattctttattatttgtaccacatgtggcatcatcctaaagtcactggaaactgggagcacaagggccacactaggtcctgaagaaatcccgaggtgagtgggaactgtcattaccaataaagagctacctcatttaagtggtctctcctttcagcagagcacagtgtgctgctgccatggctgctgccagcaaaggctgccttccagatcggctcctttctggacatgtgcaaggaaatgtcctgggcaggcaaagtttccattggttttcagatgaaggggctgttttccaggggttgatcccaggaaacataaaagtggagaccacctggggcttcagtccaccctgtgatgttattcttgaagattaagataatttaggaagagtaataaaaaatatgagctaatatttgttgtgtgtttgttatgtcaggcactgttctaagcactttgtgtgtgtgttcaggctgaatcattggaacagcttttggagggacatgcatgtattaccctgacagtccagtcactccactgccccactcatctggatgactgtgtcactcctcctctctcccaaagctgcaggggtaccaccttcctcattcttgctgtcatctgatgactccactaagaaagtacaagaaaccagaacagaacttccccagctgcacgtcttctaccaccagagagtctgtgtcaacatgactcccctcctgctgccatggaagatggccagcccttgtgcatgcgcagtggaccctatccgctcttgcctactctagggcatcgcatcagtggttctcctctcccccatcatcatgttgttactctctgctagttcactccctacagcctaccaacatgctttaatttttcccatgttaaaaaaattccactcttgactccgtatactcctccagttaccaccttggttttcagtccccatttacagcaaaaatccttgaaagagttatttattcttgatctctccaattctcccccaaatctatcctactggggcttttgcctacacccttccatagaacccagtcctgccaagattaccagtgacttacctaaggggccttgtaccctgggatgctgtggggagcttctgtcctttgctaagattgagtgggggagggaactgcctagagctgcctcactctctcatcttcttcccctattccctccaccttcccttctctctccccaacagtctctacctcctactctccccactccctctccatttccctttccccttcttcttccctcctctccctacctgctctcatcccaccccatttccaccccatccataagaggtgggctgtgtggagcatgggtctcagagccagagacacaggcttgcaccctggttctgccactcagcagctgagagacatgggtgagttgcttggctctcagggttcagttcactcctcggtgagaggagaaactaatgcctcatggtgttctccagaggggtcgggagaccatgttggtgtcaggtcaaatgcaactcttagtgtgtcatttgctcgtagttttcctctctgtggcactgtctaaagcttccagaacaaatcaccacaaattggaggacttaaaaggcagaaatttattctctcacagctctggaagctaaaagtccaaaatcaagatgttggcagcattggttccttctggtgactctgagggagaatctgttctgtgcctctccactggcttctgatcgtggctcacagttcttggggttccttggcttgtgaccacatcactccaacctctgcctccatcatcacacggccttcttctctccgtgcctctgtgtccaaattcccctcttcctataaggacacagtcattggacgggagcccaccgtaatccagtatgacctcatcttaacttgactacatctgaccttatttccaaattaggccacattcgcaggtactgagggttagaacatcatatattttgggcagggacacaattcaacctacaacattgtcctgaaagtttgtgcccattgaactgcaggcaacacctgggaggtgctcacagattaagcagagtggagcgccataggggtagtcaaagaaaaggctgtgctgggaaggaggcctgagccttaagccctgcaggaaacacatgagtacaagtgacaacctgggcttcaggaggaagatggaagtgggttgaagcccagctccccgatttgctgcggtgagccttaaacttttcagggaatcacagatgctcccccctcagaaaagtactcacatacacacacacacacacacacacacacacacacacaactgagcttatgatttcaggggttcatggatctcaaacacctgaatctcagaagaactcctgacttccacactttgtgacagtagacaagttatttagtctctccgaccttcagtttctgcactgatgacatggggatgtggtcattacctgcaggctgttaggaagatgtgtgagaattcagtgtggtgacatctgcacgtggcgcagttctgatctccagggaccccagggaatggcagtcattgctcctggttctcttgccacccttctttcctccccactgcctgctgctcctgctccctgggcatggactctcatttccctctccctctccctctccctttcccagttgggctggagatcttcagcctattgggcttgaagaaggtagaagccggggcagagaagaagtgtagggtgatgaggcgatgccctacttctctcatccattaccattagaaatgcctttctgcaagacgtcccagctgacatggactgggaaccatatttttaaaaaataaacatcagaccttaaacaacatatcatgggcactgtgtcagaatgtctctggccaaattaaaccccagctcatctggtttaaacaatatggaatatttgattttccttcacatagctagaggttgtggtgaatggaagctgcaggatcagttagttccatggctcacgacatcctcaagggcccagctccttctgccttttcactgtatcatcctcggtgttagctttgtcctcagctgtctcccctcatggtcacaaaatgggtgccatcgttccagatctcccaacaaacacaatgttcaggggaagaagagggactgctcttccttgggtcttattttaaaactgaggtcatctttctcagaaatcctcccagacacctcccttcacatcttgtcggccagaaggggcctgtgctccactgagagactatgtggaaagaatatggaattaggatagtgggattagactcaccagaaattagtcttttttttttcttttttttttttgagacggagtctcgttctgttgcccaggctggagtgccatggtatgatctcagctcactgcaacctccacctcccaggttcaagccattctcctgcctcagcttcccaagtagctggtattacaggcacgcacaaccatgcccaggtaatttttgtatttttagtacagacagtgtttcaccatgttggccaggctggtcttcaactcctgacctcaagtgatccaccagcctcggcctcccaaagtgctgggattacaggtgtgagccaccgcacccagccccagaaattgatcttaaggagaagatgggtgttggagcatccactgacagtgcctgttacaggtaccaatcaggaggctcagtgtgttctgaggtaatagaagatgcagagcttgtggatgagtcaagcttcaatgcaatgatccaattgtgaaacacagtgcgcaaaagattgcttaatcctaaattgtaaattaaggggaaaatgtatcattaatgagagcagacaagagaaatgcctaattctaaattgagagtggagaatgagggcaggaaactggggatggttgcttagaggagacgccaataataaagtgaacacatcttcagcgtttagtatatgcccgacacaatgctaagtgcatcacatgcattaactcactgaaccccttcagtcgtcccgtcatagttactgcaagttcccatttggtggtgaggaaactgacgcacagagaggttaagtaacttttcctaggtcattaactttgttcactggtccctgaactaacttgattctggttgacttcagacccattctgttacttaatccctggccattcctcctccctaacctcataaaacaaaactttctaagaagacaaatatgagttccccagatggtgaagctagagaaaggaagttagtaagttcaggcagaaggggcagcaaatcagaaggagataagaaggatcaaatacaccttctagaaatgtattagcaggtttaggcaggaggcagttaggacctctgttagttggtccaaaaataaaggaagaggcaaattgaaaatatgtatatacattattttcaaaagaggaaatattagtattaacattaatataattaatgatggatgggtatttccagaactgagtttcatgtcatcagccttaagaaaaactgagtttctataaaggattcttgagatttggaaatgaatctagaaagccattcagtgtccaagcgagttggctcacaggccatacttgtagttcctccatatctgccagtcaatattctccattctctgcctccatgttccagagggaactaggagtcttcctcttggtcaccaaataggctattgatcaatgggtgggcggaccacagtcatgggtgcacagcccagcactgcttcccaccaagggccataggcagggcagaatcagctaaatagaccctaacacaaggcaggataacaaagaagggagaatcaaagctgacccaaagaactgggaagatgaggttcctggaagcagcaaagtggatggagaacatttaaaagaacaagtttgtaggaggaaggaaggtgttcagttttgaatagctggttttgagaagatgatggtacatccaagagatggcattagaggggcagaactagaatgcagggcaggactttatacacagagatgagattcagtcacattgatgtgaccattcattccattattgagagtgtatctggcactgtcctaggttctagagctgcagccatgattagaataaagcctctgcccttgtgcagcatgcaatcgaatatccaagcccttgaaaagaaatgatcctctgcacaactctccatactattttctgtatcctgtgtgaccatgcaaagaaaagggtgaggctgagttgggaaaacacaacgaagatggtgaacaaatgaaaactgaaacagggaaagcaccatcggagaacagagaatcgagaaagtgtcattttatggaagccaaaagaggaatgagtttaaagaagaaattagtgtcaaatggccccaggctagcagcaaagaaaaagtcatgaaatttgacatgagggttgccattggtaagcttctagcaatggtttttgatccttactgtgcatcagaatcacctgaggagctttgaaatacacagatgcctgggagctaatttcgagatccagactcaattggtctgaagtgagacttgggcaccagtattatgtttcagtgactctgatgatgctaagaggcaggtagagtcaagaaacactgctttaaagaaagggattccagcaaatgttcattggctccatttagcctttccacaatgtgtacatatttcaaaacatcaagttaaatgacgagttaatgggtgcagcacaccagcatggcacatgtatacatacataactaacctgcacattgtgcacatgtaccctaaaacttaaagtataataataataataataaaacatcaagttgtacaccataaatatatacaggtgtgatttgtcaatttaaataattaattaagggagctctgacaaggaaaataaggaagtgattcttgtagagtgatagcagtagaagctaaattgcagagattaaaaagaagggtgtgtttttttcatagagagactagcagtcttaacatcagacatggatgtttagcctcagtctcctgccttactgtgtgatttaacctctttgtgtcttatctgtgaaatcaggatagaaatacttgctgtgcccaactcacagtttccttgggaggtcaagatgggataatacatgtgagagtactttgaaaaaagattgaagtgctataaaaaatgtaagatttatatggttgtcagatttttttccccaaagatggtcctgaagatagtgattatcaactgtaaagacctacatggaaccagcatccctttccacactgagctcacaaagtcagcaccctttgataagtgctcacagctactatccaaaggtctaatgctgtttgcaactctcgctttttcacagctagctttgcactgggtctataatagatgcagtttccatagtcttgcaaattttgcctaaaattgctgaacaacacagccttctggcataacactacagttgaaggatgctgctgtaaaggttaaaaaggaagtttactgtgatatgatccccattagattgtcaaccctgtggttatagagaaaagggaaagcagaacagattgagagacatctgtgagagcaagcaatgctgcagtatctgaagagcctgatttctcaggcagatggggaaggattggcaaagatctgagccaaacccagcagtttttttcagtgaccaccttgaggtctatttgagtacttggatatgcccacctacataatatatgccatgctgggtctccaagtaacgaagcaatacttctctcaatcttctgcaaactctgactgcccttggggtaacacctggacccaggtgagaaatggaacttctttgcggtgactaaggtccaggagagaggctttcttcaatcatagatgatcttagatgtgaagagtaggattacaaagtgctttctactcactttcaggctgacattttccttaggggaagataccaaaaaaatacaattctttgtcaaggtaatagcatacttaatagttcagcttcttttttccaattagcagcttgaattcagagcaaaaagaaaatgaaggacaaactgctaactagtagtgaagccaggtgtcagataactggagaaagcatcagaggtatccccgggaagatcagttacctccatctctcctctaagcctgccctggctccttctactctggttgcaattaggatgaaggtgctaattacattctccaccagcagaaaggctcacttcaaaactgcccttctccaaaccgaagtacagacaccaaagccagccaccccctcatcttacaccacctccaacaggactcagagcttttttcatgtaaaaccacaggacaaaatgggattttgaaatgaagatataaggttgcttcacaagggtacaaggatcttcttatccagtgagaagtcactttccctgtgctcaaacatccttgtaaaaatccaggaggagaaaggggcacataagccaatggaaataccaagtccatggctcctttcttaatgacaaataactactttgaagaaggatccttcatgccccagggtacgggagcctaaatctctggcttgggaggaaatgaggaataatactgtagtcattcagtcctttactaaaatctcactgtttaaaaagctgctgttatcttggccaagttatttaacctccctgagtatctttctcctatattaatggaaaagaataaaaatattatcatacagcattattgtgagcatgatttgagatagaacatgcagggccataatgtcaaacatggtgtaactcaatctttttttttttttttttttttttttgctgctactgagactgagtttttcaatattagaaagtccggtgacctccttactatgtgaattccctgtgaacacaagacaagaaatctcagcctggagtatgtgcttataattggagcagggggcccagagcccagggaagggagtgcttagcagtttattcttcaacaattcctatcgtttcatctgtggaagcagtactcatcaataaatcagcaagtgacaggacatttttcaaaactgcatggaaatgttaccattttatactgttataatcatacacaaacaaaagagtatttttcccctgctctcaaagatacgttgttgacacagtttcagaagcacaaggcagaaaaactgccccaaaactcaagatgaaggctaaaattagatttttttcaaacacctcccctgacagtacctagtaatgttattgtggctgttgtaaccgtgggtgattgcctatacacacagttggtgcaatgaagagacacaatagcttaaaactaaactgtaagattatttttcaagtagcttctccaagtataatacctcagcttctagaaaaagtaatcactgctaacatttgaaaagtcaaaattctatgcaagggtctgggagattaacacgattgagcataatagctcctttcaaaccatttcctagggactaggctgcaaaaagccttaagcttgaagatggctttccaaatatattttatttattcaatgaagaaaaagactatttgaagtttccatattcctttcacatacagacacttcactgagctttaagagaagcattcgtctgtaggcgcaaaatgagtaattccccagcttctagaaaatgcaatcagtgcaaacatctgaaatgttaaaatgttgtgcaaaatgtcttttgtagagatatagaaaaaaaaaacctgaagtaaatatcattttaaactggtctcagcatttatgtttaaaaatgaatacatactcatatgcttagtatctgatgcatagatcatctccggacagcaacagcagctgcttcttgggagggtaactgaggccctgagagataacagtgggagggcgtttgttcacagtgcatccttccttggctttatattttgtactgtgtgcatgtattaatattaatctaacttaatctaaccacttaatttaattaaacatggcctcttcaataagcgagtcagctcatccatcccggtggagcagatctttctccaccatcagtactggatgctgaccttctccctggcctggacctcagggatgccgtacagcaaacttccctgacttcttttcacactgagcactaggtgggtgctgtgctggcactaaaaggatacaatgaacgtaagaggttgtctcagggccgtctgcacaggattgctagccctcccttcccaggctcctgccttactcagctttctccagggaccacaggaggcctctgcatatcttatgtaccactctggtcctttccttgttgcccccaacccctctacccttgccaacgtgcactcccttcctcaggaactctgagacacaatgaataagggagaaggtgaaagcccctcttcctctgggctctggagtaccagtgaaacacactggggccaaatcctcttctggaacacactaacaatatgaccttgataaagtcaacctcactgagcctgattctgaactcttgaaatggtggtggtcattatatcctcaggggaatggaatagagattgaatgagatcagttatgtaaaatgcccagtgttacactcaacacatagcatgtgagcagtaagtgttggatgatatcatcgtcatcattgtcagtagaagcaatggtagttctcactgccaaaacatgattgtttcaacctccgcaggcctgtacacatctccagctctctgtcctgggactcacttacacacagtgtggattagcggaaagggtgggctttccagccagaggggctttaccttgagcaagtccttaacttcttttaatgtcaatttctttaactataaagtgagaataattttataccttcctcataggagtggggcaaagattatagataatatctacaatgccctagcacctaagtgccctacatatcttggctgttttgactttactccaagggggctgatctatttactggctcctgtcaagacttgccctcttctgcctccacatctttgttcagttctgttgccctccctgccccgtcctctctttccacctccatctctggaaactttcatgcctctgtttcatctgagagattttatgacactttctctgaccacagtgaattttcccacaattgaattcgtagactgcttatcttctgtagggaaataggaggtgcaaatccagaagactccaagacccttcctctgagtcctctgttagacttattagaaatcaaggtgttaggcaacagccggcagaaaggactccggtcacatgcagccaaagagcagctcctcagtggactcactctgagctccccacacgatgatctctgtgttgcctgggaggggtcacttgccctcctgaaagtcaactccctgatgccttattcaggggtgtctcataaaataaaatggccaattggttcattgataaattaaggcacactggggcttctagcacgtggacagactgcagggccacgaggcgcgtcggctgacatccgcaggagcagctggtgtctcacctccccacgggcctggctccagctgctttgacatccattcagtgcaaatcacattgagtcactcctctctgtgaactttggatggttctgagcagcgctgcgagaggatcctgaccaagtcctcaccatgtcccacaggcccatcccgatctgactgtagtcttctaggcttttctcttgcagcagtcacctcctacctcttgctcttccccaagcccaccataatctttcctgcttctagtctttcctttacttggaatggcctttctaaacttctgtacctaatgaatcctactcatgctttaaaatccagctcaaatgttgtcccctatgaagaactttgctaacctcccagacaaagcgtgttgcccagttttctcagcagtcctctagtgtggagctttttgcgtagtacctctgttacatttacatccttctccccaacaagaccataagcatcgtggggtcaaggatgattttataacccctgagtctgccaagcatggtgtctgataaccaacacatttcattgcatgaataattaaagaaaacagaaataaatgaatgaataaacaatgctctttttgttttgttttgtttgagacagcctcattctatcacccaggctggagtgcagtggcgcagtctcggctcactgcaacctctgcctcctgggttcaagtgattctccttctttagcctcctgagtagctgggattacaggggcccaccactgcactaggctaatttttgtatttttagtagagacagggtttcatcacattggccaggctggtctcaaactcctgacctcaagtgatctgcccgcctctgcctcccaaaggaacaatgttgtttctaacaaaatacaccacctttcctggccttcccacctaaatgggttcctggaaattgttcttggccagtatgggttggtgaggggctagccagggagcagagtcatgttcgcaaaaggtgggcactcatgagagtggaagaagggaagtaagttcctatgtctagaataacactctcctagaaaacattacatctgggggatttttcatttctgtgcttcttattttcactcgcctatactcttgcacaggattgatttccaatgaaatttgataagtgatattttgttaaaatgtcctgattttttttaattattaaatagctataatcccaggcctgaaaaatcccttatccagtagctacagttgttttttgaagcaccgccaccaaaattattcccctggtaattattgagcaatccgttttcacccataagcctgtcacatgtaataaggatgcctgcctgcctgtttattttctggctaatttggtccctttacatcatgtgaccttcagtggcctgtatgcaatatgaaaatcgtcctcctaggactttctttagaaggttcacagaggtgtgctaagcataagtaatacatcagtttttaaatccaggcagagcaaacccatatcagatgtctcaggaaagcctgcaatgctgttttataaagggaacagacgagtttcttgatctttgctattctctgcaagaaaatatctcacctaagtacatcctttcgtatgcactctgtagcaggacatttacagggtcagagaaaaagacactaaaaacttacccaagctgttagctcatatttattaactgcttaatataggccagggtgcaaaggcctttatatgctttgtttaatcttcccccaaaccctgggagatttttatcccagttctgcagattagcagactgaaacacagagaagttgtaacttacccaaggtcacctggctgtggatgccagagtaagcatttattttaattgatacataataatcatacatatataggtacatagtgatattttgatacatacaatacatagtgatcccatcagggtaattagcatatttgtcatttcaaacttgtatcatttctttgttttggggcattcagtatcttctcttctaggtatatgaaaatatacaatacattattgtaactatagtcatcctatagtgctatagaacactagaacttattccttctatccagctgtaattttgtatcctttaataaatattttatcctctctcccccgtacacttcccagcctctagtattctctgttctactttttacttctttgagatcagcttttttagcttctgtgtatgagtgagaacatgcggtgtttaactttctgttcctggcttatttcacttaacataatgtcctccaggctcattcctgttgctgagaatgacagaatttcattcttacttatggatgaatgggattcctttatgtatatataccacattttctttatccattcatctgttgttgaatacttgggttgatccatatcttggctattgtgaacaatgtggcaataaacatggtggtagatatctctttgacatactgatttccgttcctttgcataaacgcccagtcatgggaatactggatcttataatagttcagtttgtagtttttttcaggtacctctgtactgttctccatagtggctgtactagaatgcattcccaccaacagtgtatacgagttcccttttctctgcatccttgccagcatttgttattttttgtgtttttgataatacccagagtatgcttttgaagtcaggtctttctggctccacagtctgaaggtgtaacactaccccaggctgcctctccatagcatgtttcctgatttctggttcaagaagactttttctaacaggtgtcattcctagatggctctcttaagatcttactccctttggcattttacaccttactcatacaatcatttttaaaaaatagcaatttaaaaaaatacagttcaagtgttcatcatatccaggcatgcaagccttttctaaatttttttaaataataaaaaagccccacagaggaaaggaggttatttgtgtcctcctgacacacacttttagattttggttaaaaagtctctagtgggtgcaaagtgaccccctttgtcactggaaacaaataggagcattctttgtgccactgtccacaaccacacagatatgtttcccaagggagctcatcaggtcttcaaacatttagcaagcatgacatgtgtaagagacagtattggagaagtaagacaagccttgctctgccgaagcttacaatccaggagctcaccccttcaaggaatttacagcctccagacagataataacattaggtccatgaaagcctacaaggcaagaagttcaggagagaaagaagtcataaccatcttggaagaatctcaacttgttttatcagaactcaaacgccaatttctcacccctagcttccctcattagcgcttattaactagtattgggaggaccaagcgaagagtaaagctagggtagcagaggccataagctaattgcaaaggacagagctaaagaaacatgctagtttcccctgagcacccaactgcatgactgaaaatggattaatttgtatttctaatggatatacaagaaacacgtgaatatgctaaaataaatttaaggtcaagcaatgcaaagtgttagtgcgtttgccttccactctcagaggcagcctctcttatttggttcttgggctgcttcataaaaagttctgtgttttttaatggcctcagcttttgggaggctcaggccacctagcccatcaggagaccaggcccgaaggatggatctgaagagtgggcaacggagagttaaaccagggctgacttcaacaggcccagtcaagtcaggggcaagcacattgtccatccactggaagacggaaaggggagaggaaggcaggccctcccgactcacaggtcacctcgcaactttgctaggcactacccaccctttagggataagtgaagtatgtggtgggcatacaaggcgcacaggggagtcattctggcaaattccaagaaggttttaagggctcccgaggcaggcaggcccagttgctgtttggagcttcctttggggtgggaggatggcgggggcagggggccggggcggtgccttaacgaggggagatgcttttaaatagctgccttccaaaaaccatcctccctgcttctttgagaagcacccagctgttgtttaccctccaggacagcaaatccggttatttgtctctctattccgtgatattataaagtaatgaatggtccattaaactaagtttgggatcccgtctccccacagccacctcctcgccggcaccctcagccggggaggccgtaggctcggctgcagcctggcagcctcagtccccctccctccaccatttccccctactccctccctctcctgcaccccctccccccggttatttgggagattagagttcattaattaaatcctgtgcttagatcgaactgtaacattattccaatcacatttatcttgcaggcggcggaggagatggcagcctcgctggaaacgcgcgggggagcctgagccggcggccggggacgcacggcgctgcgcgctccttcgccacgccgccgcgcagcccctccatcttcctgctcggcaccgggccccgcgcgcccctgcctacggggtcccgctgctctccggggctcctgccagccccaacccccggccccggtggcctccccccacccccgcccgggtccccctcctccgccacacgcgcgcgcgctcacacacacacacacacacacacacacatatatacacgccagcgagctgctggccgctcaatggaccgatttccccggtttccctgaacccagcccagcccgggatgagaaactgcaaaatggcccgggtcgccagtgtgctggggctggtcatgctcagcgtcgccctgctgattttatcgctcatcagctacgtgtccctgaaaaaggagaacatcttcaccactcccaagtacgccagcccgggggcgccccgaatgtacatgttccacgcgggattccggtgagtgcgggcctctgtgttagtgccctcgggaatttggttgatggggtgtttggggaagggaaggcgtgggggaggggtgttttggcctctccgagactctttgggccagataactgcgcggtccttccactcctctctctaattctcccttccccctccctgttattttttttttaacccaaagcccctagaagccgctgtccaaatcgatgtgattgcatttctcgtattcttcctcagcatcccttccctcatttcagaaatgggggttgggggaggctttcaggagggtgagggtggagggaaagacggtgtgtttgttcgggagggggcggcgagcagagatggacaggcgtgaggggagcgccctccccgcgccctgtccgcagactccgcgggccgggcccggggcggtgcgggcggtttaatggcgcaggcgccggactcccctcgcgccctcctccttttctcccccacgcctatcaaaggacacgcgggtttattctcaggaagcccctggggcgttctctctcgaccctttcccccgcagccaccgccccccaccagctttccgggatttctgcaattcccccgccccctgcgggaagcgagcctcggaagggccgcccaccctcgccaggtcggagtcaccgctccgcgctgggccggcctgtgaaggctccaggcgcagcttgacgccgctctgcgagagcccccgccccgctctgtgaccccgggaactctcccagcagggcctcctgacgggcaggtggcaactacaaagtgccacctgtggtccaagctgggaccgaggcgaggaacccagaggagcctcgcctggaccgaggagcggagtaggccggcggcccccgggggtccccagccaagttataggaagtgaaatcggacgtgggtttgggaaggaagaggttaaggcaggaaccacccccagactttccctgggtctccggtttcctctgccctttctccaaaaacaattctatggggctgcaaaggcgtagcgggtcaggctggcggggcggccgctgtccgcggtgctgattccctggtcctcgcagcgccgcgggctccagccctgcgcccggcgtgcgccctgctctccgcatgacggccattttatggtctctccggcacccggagggatggacaatgcagatggggttccctagttttctttttttctctcgggtgtgtgtgggagcagagggtggaccaaatgagaggggctccgggacggaacggagcccgcacgcgtaccagccgccctcgccccagccgctgcactttaatggctacctcggcttccccgagctgaggccagcacgcttgtctgtgctcatgctcctctccaggtcacaatttgcgctgaagtttctagacccgtcattcgtgcccattacgaattctctcacccaggaactccaagagaaaccttctaagtggacatttaatcggacagcgtttttacatcaaaggtaggataggaggaaaagatccaaaaggtgcttttaagaattcaagagctcaaaacaaaacaaaacaaaaacaagcaaacaaaaacatctaaaacaacaaacatctatacgccccaccctcaccatcaggtgtatctgcattgttttcttggcatgactgcacaaagcaatgatcaggaaccttctcctgtgtgtgtagtgtcctctcataaaaaggacatatcaggaccaatttgaatagcaaaaaaaaaaaaagcattccacttgggcttgattgagcaccatgatttacagctaacaagtctggcaagtactgccaaagccatctatttaaaaaaaaaaaaacagacaaaaggttagttgcaaaaagaccacccaatgcattttcatttcctcactgaaaaaaacttgaaaaatagaataaagtggtattgtttctttgaaacacacggaaaatgccataatctgtctccatcaaattactcgtgaaaatgctggcccaaatgtatgtagatatttaactatggttttgttttggttttgcctgttttcattgtctttacagcttttaacttactgtaaaggtacctaacttaattcctactaattgtagcggtttcattttatacacataagatggttttgaggttttgtttttttaggtggaagaaggatgagatttgttcaaatgtatttattctgctcagtgattctggtctactcttagcaaaccacgataactcattactccttccttcatggtgggattattttactgctaaatgggatgtgagccatctagcgtattcattagaagtgtgaatacttattttacaaaccactctatttagggagttgtgttttgatcttagcatttctagttattgctctctctctcttttaaaagtttaatctatgggcagaattaaaacaaattcagtgggtattcatggtctcatgaaaatactgttcagatgaaaagtcagcatacagtcatatgattaacattttaaaaacacttatgtttaattataaattagttcatgaaaattgatcaattctaaaactctagaagtgtttttttaataattgggttttaattcaatattaattttatggacaacccagaacgttttcatgggtagaacacattctagctttccccaaaacatgtttctaactcaataaaaaatattcttcccacactaggccatgtgacccaaatgaccagtcagaagaatatttccttctcaaaacttcgctcattttaattaattagataatctttcattaaatttttaccagtagcattttaaatctgccttacctttttaacaacttgtaagagtggtactggtaacttggggagtttcaaagatttcagttgctgttgcctctattttgaagaatgaagtcatttttaaattaaaattccaagcaacggatgatgtgcaaagcatttcatttcattcctgctacatttaggcaaaagttataagaaattcactgggtttacttaacatcggagaatctagcagcagtagcatgttaccagtctctcttgaatgttttaaatagctaaactttaagaagagatacttaattttacttaaagctcaatatgaaagcaacctgaaattagttctaagtatcagtcttgccttgtttatgtactgaattgctagaatatggaaatattttcaggatttataatagccatgttttctaaggattagatttattcaactaaattgtgtttctatataatcaagtagaaaaaactccctgtttcattattcaaaggaccttaatgagattatcatctcatttctattaaatattcagctacacccactgctattaccatcttcatattttaataatagatagtgctgtactgactcatatctatttggctcttatttggacaccactgatatttgatattctttgagcacttcagtccagtagcaaacaagtagaccctagttacaaactatgtgttactaatgtttgtgcattaatgtgagctctttcaggcctgtgtaaattgtctccctgtattttctgacacaatttgccctatacctccctgctgatcaaataagatacactcttcacgtagagcagaaaaccaaggtatggcagctaaaactgtaagttgcatttacaagcctcaaagaatacacccagaaattgactgaaagattagaatatgcggagattctgaagcagtcctcccttcaaggaccacaattatgtatgtataatcttttttggattcaatgagcctaagattccctctgaatgaaatgtcagcataagtcataagatggaaaatcaattcttctgaatggaatgcttttcatgaatttctttttattttaggcaagaaattcttcagcatgtcgatgtaataaaaaatttttctttgaccaagaatagtgttcggattggacaactgatgcactatgattattccagccataaatatgttttctctattagcaataacttccggtcacttcttccagatgtgtcacccattatgaacaagcattataatatttgtgccgtggttggaaatagtgggatcctgacagggagccagtgtggacaagaaatagataaatcagattttgttttccgttgcaatttcgcccctacggaggctttccaaagagatgttggaagaaaaaccaatcttaccaccttcaaccccagcatcctggaaaaatattacaacaatctcttgactattcaggaccgtaacaactttttcctcagtttaaaaaagcttgacggggccattctttggatccctgcatttttcttccacacttcagcaactgtgaccaggacattagttgacttttttgttgaacacagaggtcagttaaaagtccaactggcttggccgggaaatataatgcaacatgtcaacaggtgtgtatattttattacattttactcatactccaccagatggcaaatcaatgttgtaatctcttgggggtgggagccatccaattcattagttgttgtggtgagtttagtagtaattagaagaaactcatatgttttgtaatgagcgaatgaatgaatcattctagctaagaagttccatctacccacagctggtaaccaagtgtcagatggaaggattggggcttcatcagtctcccgtctctattctctgtcctctcccttggtagtaaggctatggagcagtcatggaaatcaccacaaatcaagaattttctttaaatagatagctatattccaagaatgccaatggctaaattagagacaaatcaagtggtttttctttttagaaacgatgcagttgacttaaatttatgttttgtagatgtccaaggttagcaaaacacctaaatcataaattgcacaatctgcctttataatctgatatttgagtgcaaaaacatgaagaaagtattttatgagcatgttgttatctcttgggatttgatagacagattagccagagatgcaatattttcttctagtctggtgattttcaactctggttgtatattagaatcacttgagagctttaaaaatactattgtctaggctctgcctcaagagatcctaatgtaaattatctggtgggcagggaggtggaggccaggtacttggtattttttaacaactctcctgatgattccaatatgcagtcagaattgagaaccactagcccagggcattttataaaacaagattaattgtagattttttttcttttaaatcatctggagaaaattatctcaacttcagtttcccctgtgtaagtagcctcagtgtcctaacatagccctaaatattattataagttggggtgggttctggagacctggtaaacagggaattctgaagatctttattccacaatagatttttcccatcctgtagcctcttaagatgtaagatctgtttagttgacctctcataggaggaggaattacagcctaataaactggtttgtatctcaatggtagagtgatgccataatttacagtccaaactggaacattttctttgagagaaagagggtgctattaataattacaacacagataactgacaaactgggactgtcccagttccccaggatatatggtcacctttttaagtggtgatgtagcccagctcctaagtttaaagatgaatcaactgaggtacaaggagcagaagttatttacccaaagtcactgccctaaatgagcaagactagagttagaagtcaggtctcctgccaacctgtcccatggtcttttgatctcctcattttgctccccttttgttcaatttaagtttgtctataccgaaagggttgtcagagtcattctagttccttagacaggaatagtaaaaccaagactgaacttttaaatttcatttggaaggggaaaggttcacctttgaaatcttcaagtagtgaagaagaaactgcatgtgcttagaaacttccagaaactatcctgtgtggctgcctgccacaaaagtggagttaatcataatgtttcttagccactcgggcctcaaaaaaatacatgggttcaatgaaaacgggaaggaaatacagtccacagaaacctgactaatgcacagtttcattctgcctgcatctccaatgataaatacacacaccacatagaagcctcaaatatttggcggtgtcagcaggaaggcttcagagtattaatattatttaaatatggaaggactaataactataatttattatttacacttaatgtatcttacacactttctgaatttaaaaaatttagcatgccagattgtggcatgctgaagatgggcttgggaacccctagttagaagagaaagaagcaaggaatacaattatttgcaagagagaagaaaaataaggctccacaatctttctaaaccccgaatgaagggtttatttctaggtttgagaaaggaagagacggaggagtttcccttagattaaatgacctccttcaccctatccaagaacactttatgtaagaaaagcagtcattctttttggtggccttctgttgtgtcaccgctgggtcagagccacaccactctttagaaaaacccaggggcagcttcaaaggccagcttcaaaggtgtgcaaacagtgtgatcccaggaaatcccatgctcagaagggcccaacacttggtttaatactttgctcttgcactcgaaattttcaatactttttgaaccaagactccacatttttatttcttactggatctcacaaattatgtaaacagttgtgcccagaagttgtttttggttgcctaaaatataatttcaaaacaagcactatttaagttacagtaacaaatccactacccagcccagtcagatagaccttgctgattgaaactttcaacgctgacctctgaatccaaatgtacttattgttccacaggtactggaaaaacaaacatttgtcacctaaacggctgagcacaggtattcttatgtacacccttgcatcagcaatatgtgaagagatccacttgtatggattttggccttttggatttgaccccaacacaagggaagatcttccataccattactatgacaaaaaaggaaccaaatttaccaccaagtggcaggagtcccaccagctgcctgctgagtttcagctgctgtaccgaatgcatggggaagggctcaccaagctgactctgtcacactgtgcctaagaactccaaacggaaagtgccaaatggctgtttaaaaagtgccccaaatcaaattgaatagccttcagaatagaaccctagagaatgtcttataaggattgtctgccatttaaaaggaaagatgtcttttctcttttgcactgctcttttaagagttttagcagatttagcaggacagatgcattgaagccacatggtttagacttgattgataaagggaatgttgcatttgggactatgctgctaacgaaatggtttgaagtattttcatgtttggattttaataataaactgcctctcatttttatgaggactagagctatagtttctgcagctctgctcagatagtcctcataatcagaggcctctggccaactggggcaggacctgttttgctggtgggatcagactctgaaaaatggaaacgtaaaaaactggtttgcatatctcatcttctatctatctccctatctccatctctatcaccatctcactccctccctctgcaactactccctgccctaccaccgtggagtttaataatttgctaggaatcctattgaattcgctttgcttgtatatgttgcatttgtacttgatgtgtttaaggttctgggtaactttgatgcttcatgacaaaataggcaaatcacgatggactcccttgtgattccttttttaaagaaatgcctctgatgcagtcctcaccagtccattcagtcattctacagcaagatggtccctctgtggtgagtgggatataaggcagtgcatctttcatgatcacaaagaaagcctatgttgtggatagcattgcgtctcttgatgtaggcattgttatggcaaataatagcactgtggccacatctgtaaggccattccagcctaaatttagtgtctcccataatcccaacccatgcactaggctgggtgttctctcagaatatagaggcaatgaatcagcttaagacgctgggacacacaaaggaaaaggaagaagaatatttagaagttgttatggaatcctgtgtaccctaaagtgtggtaaccatgttacccattccagctgggttaaagtggaggaggatcttggccaggccaggtgcccaggtgactagtgctgaggtgcgatcgttttccgtgtcattgtgtgcaccaccaccaatccagaaccatttgctctctttgagaacattgtagcactggatattccctctttccactgaagtcagatctatacaactacaaattaagcatttcaaaagaaaaagccattgtgcagtggcaagagttggaatccaagattatgtagacctgcgatgaaggaagtagctggccattctcattttctttatttcagccatatgagtagaaatcaaatcattcccatccctggctttttactgagcagcactttgttcttccaattcagcccaacgtctggccaagttgatgttaaattttaataagagtttcttctttccaaatgccagtcaagcatatttgttatgcatttgagtggggtagctcattcttttcctgaaatctcatctagattgcttgcaatgcgacaaataactgtttaaaaaatgtgctgtagttcagtgatgagctcattgcccctctttaggaaggtaagatcatgcctaaaattaaaccgaatatggtaaggaaagacactatcgttatgctcacgttctgcctggtcctaaacctgccttattattattttcagaaagcaatctaattagagcaacttgcatagatctagatattaactaatgaaagaaacaccaagttcaaatgtgttaccaattatgacacacattacaatataattataaggggagacattaaaaacattttgtaattcagtggtataatttgatgggtatcacaaccacaccgtgtttgttccctgtccctttgaagaggactgtactaccatcctcacactgtgctctgttgggatcactgagagattgacaactgacagaagtgtttagttggctgttcctgagcacttagttcatttggttatagctaagtgatattaatgccaatattacttgggccagattctgactctggagttttaatcccaatgtgcccattcattttcactaaatataaatgcatagacactttaaaccaagaagattaaaagaggaaaagaccagaatctctaaaaaacagtttactgttctgtagtggacaatttaaattttatctcatcataatgccaaggatttttgtttgttttttaagttcagggagattttttaaatctccttgcagtcttggctccatcttaaccttagagtgggaggactttcccatcccccaccaccgtgttatctatcactttaatgaaaactcaaaatagtgaggaaatggacttttcttcagaacttgaggggtttagagatcaggctcatctctgcttataaggaggacttcctggagatgatcccaatagatcacccttcacttttgaagaatagcagcttctagctgaccatgcaaaatctctgtttgtttttaaagactgtttcaaagattaaatctatacaaccacttttatgaccaaaaaagttgttgtgtcccaagtgtcctaattagaaaggcagctggctctcctgcagctcccaggcttgtgtagtcaagtgcagtgaactgggcagtaatcagctcaggaccattggctctttcctcctctttcagctacagacacatgccctggcttttgcattgaccttgctttgttagttctagactaatttatccttttgtcagacactttcccttttttaggatactcacaacagagtccactttcagctattggaatacattttaccataaagcccccaaggctttctacccataacaccaacacaaaaaaccaattaagttgcagaggggggaaataatcacaaacttttggcaacctgcttaatgctagaccctctgttttcactggttattctgagtgtcatatgcagatgcagatccaagggagacagggctaaatggtggtgtcaagaattcctcccacaccccaaaaattctttccaatatttgattattaaaatatctatcatttctccaccttgtgtctgtgtcttaagtgtctgtgaatattgtaaaagtgctgtatgtttagtagtgttgtgtgcctggcagtgctgactatgactactgtgccatctgtctgtgaccttgatgtcaggtacctggccatggggctaccagcaaggatgtgcaaaggaagaaccgctgcccctgccctcagcttccttatgcccgagccactacttatccgtgaatgtgagtgccaagagaaacctaatttggtggggaagccaaggaatgggagaacgttttttctgatttgagtcaaggcactaattattagacactctcagacaacaaagcggtattgacctgagatcaaaggaagcagggacaatattgtagaatgctaggacactggaaatgaagaggccttcagcttcgccagtcttgattcttgactttacaaatgagaaaatggagaaacagggaggctaggtgatttgccccagatgacactgtcaattagtggagaaattatgattcctcctctagtacttcttggtcttaccagcatcaaatgaagctgggctcacagggaaagtggtttttggtctgggatctgcagagcacataaaataagttagaaagtctataaaagaggaaaaaaggttctcctctccctcccaaaaatgacttcccaacacagaacaataaaggagatgcttgtgtggatatgcaactgtccaccaattatcacctaccttctccctgagatgaaacaaaacacgcttggtaaatcatgatttgataaataacaattaagttactggtggttcatgcttgacagctgcaatcttacccaataagctattcatcttagtaaaaccttgttttagtaatatacatgcataatttagaagttgaaggctgaaaattgttgtgttcttctccatatatatacaactttcatcggggtcccttgagttaagaaatgccttctattttataggtaatctcaacagcagactttgaaatattgtgtttggttcaatatgctaagaagatatacaaataataataacttcgtgagtcttcatgtgcaaaatgacaaactgagcaattttctgtataattctagattcttaaaaccttttttcccataattgtttgaatgcactaggcacaagtttctgtttaagcctctgcttctccctgaatgtgtagaactgtcactttgcttacaaaggggctgtgtgtttgtggctggcagcccagatagagcactctgggtgctggggattgagggcaccttggccagctgattgacctgtctggactctgtggcccaattaatcgaggccacagatcagttggtactaagcatcaaaatgattcattatgcctctctcacactccgattgctttgccacatagataacagcatttgaaatgggaaacactttagaatgtcattattgtattatatattgtcatcttatgcagtatttctgaaatttatttttattgtgatgactgattgaagacatatgtgtatgaatagatgttcctcagtgaagcctattctcttgttgttgatgacagtggcatcagagtgaagagttgttgcagagtaactgacttcagtttaaggttaccctggggttctggggttaggacccggattatgcagctgatctcccagcaaacacagctgtatgaaataagcaactcttcaaaatacaattcttgccactcattctggacctttgattcataatgtcctgggataagtccaacttacaaagattcccaggtgattcgtgtgaccaccatttggaaaccagtaatatatacatccggagtcatatataccattttgaacaaagtagctaaatgcttatctctccttgtgcgattagtttcacatgttcgttgaggttatcatgttaaatggcaatatagacacagtcttagtgattcaacaattcagctgtttcagccgaattgaccagttgctaatttataagcaaatagtaactgatcaatttagtcagaatggatgcaagcccaaagacaaggtggagagcaagctttaatatacactttgtctcaaggccagctcttcatatttccctctttatatttcaaactaagaggcagatctcaggtcactcatctttagaattggtgagaatgagaaacagggaactgaagtgattcattcagattcaatttggaagtcattcccagagcctaaaatatttatctaaggggtctgatttatcaacctcaggtagtctccaaaacacaaaggtattcaggctaaaataaaaccaatcaaaaaaggaaattcaggaggctccagttctaagactaacccagtataacaagggtgatcagttattacttgtggccttgtaccacctctgttggataatgtgccaccgtcctaatgaagctttggccagacttctttctatagctgtgcacatagaaaggctttagacaacagtgataccaaagggttcctttgattttccttctgtgtgattctcagacagttttagctctttggtgtgctgccaaatgtttaacaactggctctggaaaacagtggaacccagatttttagcacctaccaatttctatggtgtaaatactctcatctcagccaatttcaggctactaacttaatgtcaaccagctgaaaacacaacaatatgttttcaagagccagtataagttggctccaatacagcatgagccagctccagcatagcactgcctgaacaatttttaagtcagtgagtaccaaataggagaggctagcagaggctttggagggacttttaaatgtcccctccaccaagggaagcatttccatgttggttagttttactgatttttagtaaaagagcatattattggatcccaaggtgttcaaatattccacgtgactcttaggaacctctcaacagactccccagtatcttgggagattaccaactgtggcttttctaatttctaagggtgaccctccaggaaaacattctttaatttaactaccagttaaaaccatgtttggctgatcttttttaaaaaatctatacctatagttcatcacttgtttccccaactttgtcattttccctatccacttgcccctcatccttctgacacaataaaaaaaatacaggtacccacaaaacagtgcctgcaaaggagcaggggaagaacaaggcacccagtaagctcacttggctctacatatctggaaaggcactgaggttccaaggtctctaccccaccaggggacacccagtaaacatcacgctgagagtttaagttgcactcaactggagttgatttgcccttagaaaagtttccaacggtgaagaaataccacttggtaggaatatctctgggcaacttcattgctgactgggcaaactttgtaggataaggtgtcatgtgatgtaaggctggaccatgaaaaacaaaaatctactaatacacatttggcccctgcagtcccctggcattgagcaatagagcaactgtcctttctcaccactagttgtgagtgtacttccaactgagtgtttagaaatcaggtaatctggtaatccacagaacaagctttgtttgcaaattgcaaatttttctggtagaagtcattcttaggtgggcttcattaaatctttggagaggcaatgctgggaaaaaatatgcctaattcctaggacacagtgagtggccgtaagttgttatctgcatgtactaaatcaaaattagatcatgaaggaccaaatctacttccgttgctataataaaataccctacaggttctgtaaggcatttctaaactgtaaatgcttgaaacgcaagttggacattttctatactatgtgtaaaatgccaggttatacctctattttctttcttcctaatggtcattgaaatgagcttgtttctctacattgagcaagctacattttattttaaatgagtcaggtgcatgttcagatgtctgtattcccaatacattgcatgcagcctgagcacaagtatgccttcaccctctggctcttttcctgacaccaaacagagaagtccacagctacaagcacaaggggcttgacaggtaggccttgttttattatgaacaaattcaccagaaaaccattcttgaggaaccagccactcccatagcatttttagtcttagggaagaaaattggcagggaagaaaaattgacagacaatgggaaagaggtttggtcaacctgcataagtggaataaagtcattgaagtacttgcaaaaagaagagggaggtttccctctgaaggaatctagaccattttttaatatggagaataactgtaccccatgttagaagtgctctttagccatatttcaagatccagatctgaacccatactgtgcagaaaagcacaagagcgcttacagccaagagccctgggaggagttgagtaacaggctgagatccggtcaccaagcatcattagttagcactgaaattctcccaggacacaaaacaaatgtatggaaacatcgcaatacactatcatttactcacatgggacaaccacctaagtccatagcaaaactttacagatctagatgttatctcaagtcaggattccagatcaacatcctccatgtggagatgagacaactgaggttcagaaagttggagtgacttatttgcccagctagctaactggaattagagtctgggtctcccaaccactgattctgctacaccacactgtgctgcttccattagttagatggacattgacaattaattgtgaaagcattaattagaagtcaagacaaaagaatgtttgtgatatcttctctcgcttaacatactttgatttcaccattgcatttcagcattttaaagaatagtgtatcagtatagaaggaggagcaaagctctttaagagtaatgatgaaaccaaaaggtcaaaaagtagaagaatagcgaatgtaagttattaaataaatgagcaagaagtatgtgtcagggaaaataaatgcttcttatattgttaataccgtgattccctgcccgctcaccccgtcactcaacacttgatgcatttgttttggaaagtgccattttatgctgagatactggtattgaaaacttccctctttcccaactctgtcagaagttctcttgctctttggaagaagccgagggccttaacaaatcagactgacctcccttgtgacaggcagcctcgcctgcccttggaaacaagctgccagaatgtgagggccacagagacccaagagaagccagcactgctagactgaggaacttgtaaatatcttctgctttcttggtgaacaaggacagaggcaattgcgtgtatattgtgactgtagtttgtgaagaaaatgcaaccatttgcttcgacagctcctcaaatgtacttgttaagtgtgaatgtgcctgcctcattgccttgtgttccaaacacagtactgaatgcgttgtttttaaataaaccatttcgttttgctttgggaaacactgctggttgtctgtcacattcgggagagcccccacacacacatacacacacatacatgtgctaacacatactcacatttcatccagtgaagagattgaatgcttcctcctgttttatattctcagtgttttgaggtcgttggaaatttgtaggaccccagaaagggtgagcttggctgtctacagccatgaacaagcaggaaatactcaaagtccctacacataacttttccattggtcctttaaatgctaatcatgtgacaggccttaacattattaataataatacattactcttgaaagttactattacatacatcattttatttaatgaataatcaggtgagggagagatgctgagggagttgtccctgctgtgcagttaagtgacaagtcaaaatgagaactcagcctgactccctgtccagttctccttcctctgtacctttcaccccatcccaggctctccctagatcacctcctcatagaaccttccccaactgctacagtcagcctctatcccctttccctgtgctggttttcttcatatcattttttaatggtactattaacttgtttactcattgttgatctgtgtcatccactatattataagctctaccttcaacaaagcaggaaacgttgcctgtctattcccactacacccccgatgcctagaacagtgctatgagctaagtagactctcaattgatatttataggatgaatagatggatgaatgaatgggcagatgggggaaaggagagatggacagatggataaatggatgaacaggtgcaccatggagtctgtgtaacacttcaactgtttctcatcatccttcccatctttgtacccacaccacagacaccaaaagtcttagcttttctctaactgtgctgcctcagacagcattgtgaacaaaactcagtaagcatttatggactcaaggaatgaacgaatagtcctaggaattatttttctcaatatctgtgctccagtgtcaaaaatgtctcagcatatcaatgcacaaaaacacatcctgttcttgttcctggttgatttcaatttccagcaaaaggagaaactcaagttgggtaaaaaaatacagcatgattgaaagcatgccaccttcagtagacacctgagagggcctgtgggtctttaattcaaacctaaaatccttactgttcgctgcacataacactgggcaagatatgaacaggatacgaaattagcaaaatcacaatgcttatccgaaggaacttaaaaaatcttcttggggaaatggtgcaacatactacaggtgtatgtcttataaggagaaagagagagacagaaagaaaaagatgaccccctgaccccattaaatttgagtgaagacaacaaaaattttagtggtcaaatgtaatgctcagggcttatattttctgaaaactatttgcccagctgatgatccctggcaaatacacacacacacaaacacacacacacacacacacacacacacacacgcaaatggtaagttctgaaacaaaacaaaacacttcacaaacttcagcaaaacacgaaattgacaccaagtttattgcaggctctctgcctgaggctgattagtaccaattaaaattttaaagtagaaattttttttctaagaaaatacattaccatagcttaagacaaggaagaatttttttaaaagagatagaaagagagagaatccctcctcatagaagatccaacctagcccaaggctcccaggccagtaaagatgctggccttctgattccatctaagcaagagtgtgagttcgccctcggactaggttcccacacaggttgagggtccaggggtggctggtatcagcctcagctccagaatcattccccgttttgagtgtgcaattcttggtaagtgaggttggctcaaggaatatgctgctctgaacattaactcatactgctcagaatggcagagctgatcagaaacttagagattcagtcaattcaatgctctcatttccagatgaagaaactgaggcttgggaagagaaagtgacttattcagatacgctctcctagtgagcaatagtttaagtaccttatcaatttttaaagaaagaaaaagaaagttcttttttatatcaactacaaattctcaactctaaataaaagtatttaaaatggcagtctgctcatttcacttaaattaacttatttttattattactaaactattcatcaaaaaagttggaaaatgagataagcaaaagaatatttttaaaagacctaaacctttcatctgttttttctgagtgtgtatttgttctgtacaatacatactattgtgttttctagttttttctcacttaaaattatatcaacagcatcgttccatgtcattaaatattctatgataaactcagaacatgaaagcactataacttatttaacctcttattgttttaaatgtaggttctttgcaactttacattgctgtaaacagtgctctgatgaacatctttggaattaaatgtttgattatttccttagataaatcccttgaagtggattttcaagaggtatgaacaatttttgtaagaggactctttttcaggaatatttgagaaaaaactcaatgaccaaatttctaaatctttattttcctagaaaacttaccaacaagttaggagaaaaacatgcatcatcattaaggaagacttcctcaacagaaggattatgcattattgtgtactaaataaggaaaataaataagctattgttgtgtgcttcttcaattcagttaccacatctcttgtttagaatctgggagaacttcacacactcaagacagaaagcctatgcaattgcattatcattattaatcaaataagaagcacccaggaccatctggaagagatggaccttcaatacaatgatagatagctcttttccttattctgagagtatgtttattgcttactcaatcctaccaacctaataatgcttccaattcacattaagcccaagaagtcaaaatgaggaggttgaactaaacaatctacctgaggctacacaaatcctatagatcagttgtttttgttgaacctcttttaatcaatatctccatttctataggagagatgtgaatttgctttaagcaaattcaaactatgaacatacagattttcaaagcagatattattaaaggtagccaaagcagtcaccacaggcttccctatctaccactatcgctctcttaagtaaatccgtatttctgcccaactaaaaaattgtaaatatggccgggcgcggtggctcacacctgtaatcccagaactttgggaggccaatgcaggcagatcacgaggtcaggagatcgagaccatcctggctaacacggtgaaacccagtctctactgaaaatataaaaaaattagccgggcatggtggcaggcacctgcagtcccagctactcgggagaccgaggcaggagaatggcgtgaacccgggaggcggagcttgcagtgagccgaaattgcgccactgcactccagcctgggcgatagagcgagactctgtctcaggggaaaaaaaaaatcgtaaatatatttatcttcgttggccttatggcttctcttgtaactcctcagctccactgttgcagcacaaaagcagccatagatgatatataaatggatgagcatggctgtgttccaataaaactttatttacaaaaacaggcagccgccagatctagcccatgggaccacagtttgccaacccctgctttaagaaacaagctccttactgtatataaaatatttcatttgaccttcatcgtattagtctcccagggtggccataattaattactgcaggcttgggtccttatttatttatttatttatttatttatttatttattttaaaacagggtcttgctgtgtggcctaggctggagtgcagtggtgtgatcacagttcactgcagcctcaacttcccaggctcaagtgatccacccacctcagcctcccgagtagctgggaccacaggcttgcaccaccagggctggctaatttgttatattttgtagagacagggtctcaccatgttgcccagactggtctcaaactcctgggctcaagcaatcctcccaccttggcctcccaaagtgtggaattataggcgtgagccactgcgccaggcctgacttagtgtcttaaaacaatagaaatttattcccttgaggttctggaggccagaagtttgaaatcagcatgtcagcaaaattgattccctttggaagcgctgagaaagaatgcaattcatgcttttcccttgcttttggaagctgccaaacccttgtcattccttggtttttagaagcataactccagtctatgcctccatcttcacaagggttttctgtgtgtctgtgtctgctccccttctcttctaagaatttagtgcccacgcaaatccaagatgatctcatttcaagattcttactttaattacatctgcagagacccttccctctggaaaacattctgaatgtccaggtggacataatctttttggggtcacaattcaactcactacatccatttacagcaggacccctccaccaaataactcaaggattcacagagtagagctcagggaacacaattcagtgacacacagactcagatgtactctagatgtgactggtccccttcagaggtaacaaatctaccttgcaaaagtccaacagcattattgggtgatggaagttatgtcctcaaattatattttataaaactttccaatgtattagacagtaaatatatgcgcttccaacaacagattcaaaaacaaagcaaacaccacctccaagatcaacaaattctaaagatgttcctaatatataagaatttatgtcccacaccaaagacatgctcagagccaaggatattgatctcatatgagttttccagctgggctgcatgcaccacaatgaaaaaaaaaaaaacatggatagagaaaatatgaaagttgatcaacctatgacatgaagtgataagttcagaaaaatgtctaaaatgtttcagtggacacagttgttcaacaccttaaagatcaatttaaaactcattctcatctttgcagcagatatcacagatatatagatatagatttaaacaactttagtcacaaacactaatatgtctgatttagcttccagaaacctttgtgacctaatcagcaaacaaaacctattgggaactaaggtggaaatttagtcggaaatatttttctcagaaatggaacacattgaaactatctttaacaacgtgtagaaaatagaaacagtagctgattaaatgacttaaaggagagaaaagtcagaattcaacaggaaatcagaaactaaagtgtccacaagacttgtttcctccttttggaagtactatgttcttcaaaatgaaacaggaaaaagaaaattttctgccttcaagtatgtcaataccagaatggctgcttggatccttcatcctttggagacaaaagtatatgtaatgtgaagacttctaagaggacatggcctaactgatctttcctgcagatagcctagagtatccagattggaggcacaccacatcacatacccccaatctgggtgtctagaccagggaattatcctcttgtgccagggaccactacacagcttatttgttctcattctttaatccagccctagcagaaagtatttccatgtgatggatccaggaaacactaggggagggagaagcaatgatggaagagggtaagttcagtgaatctttggtacaaaaggagaagggttgggttgatctggatgttatctaaagaagagaatcatgaactacaaaccagggacaaaagatcattctcttagctctttgtaattccctgtgttccttattgatgaatacctagactgtttccatgttgcaggtagagtttcctctctgacagcccctttaagtagtctgttatgggccgggcacggtggcttacgcctgtaatcccagcactttgggaggccaaggcaggcggatcacgaggtcaggagttcgagacaagccttagccaacatggtgaaaccctgtctctactaaaaacacaaaaattagccaggtgcagtggtgggtgcctgtaatcccagctacttgggaggctgaggcaggagaattgcttgaacctgggaggtggaggttgcagtgagtcgagatcacgccattgcactccagcctgggtgatagagcaagactgtctcaaaaaaaaaaaaaaaaaaaaaaaaaacaaaaaaaaccgtggtctgttatggtctgaatgttggtgctccccaccccaatgcatatgttgaaatcttaagccccaaggtgatagtattaggagatggggactttgggaggtgattagatcatgaaggtagagacctcatggatgggacgagtgcctttataaaagggaccccagagagtgtcttgccccttccaccatgggaaagcacagagagaaggtgccatctgcataccaagaagtgggccctcaccagacaccaactctgccagcgccttgatcttgaacttcccagcctccaaaacagtgagaaataaatttctattgtttataagccaaccagtgtactgtatttgttatggccactcaaatggactaagacatggatggtcccaggatgctgcttcaggaaaatcctcttctatttatttctttctgcctacactaaccttcctcacacatagaccctaaagttccctctcacttagctcccagcttggtgcccccttctctgctgcccctgtatggatgtaactccaactccagatttcgccttgttttgtaaccaagatcactcttgagatgcacaagccacaatctcaggcttattatggtgcccccaaacctaagccaggcccttgggaatgactgaccaagcccacagcaccccaataaccaagcctatttagggagggcaatcagacaattatgagaataatcccaggagctgggaactagaaatctagcctcctctgctgccagtttggggacataaagaagcccaagggataaaataggaagtagcatggtgatgaagaaagaaaaattaaaagagaaattaactgagtccctgtaggtagggagaaagtatctgtagaaagagaggcaagaagctggagtgggcagattcctgataacgtcacagacaaaaatgcatcttcaaaaacacattcatgattttgcatttctagtggtgtttaagtcagccacatgaatttctgctgttaaaccattgagatttggggattaatttattatcaaagcataacttagcttatccagattaatacaataccttagaccttaagctttcaaaaacaaatatgaccgaaggatggtgtgcatatagaaactgccccaatttaacctattggtatccagctacagacctgacctcccctccagataggcttgcattcccctctcctattccctcctcctgaggtggaattattctcccaccctgccctaaagtccccaccatggatggcattccttgtatttgttgcttctttggattttagctcatcttgctttagatttctgctgtgtaccttgcaacccaactaatgtaagttctttgggggccaggaccacctccccaacctcttcatgtcctttactctgatgcattcctagcaggtacacagtgtttgctaaccgcacaattgctgagatgtacctgttgctcttcttacaatcatgtctgtgaagtccctgtaacagctcatcctgtatccttggcagtatcagttctatcaacagaaagtgtctcatacagtttcagaaacaggaagatggtgtgtctcagtttgtggtctttgtactaaacagactaaacagcaaattgtaggataatttactcctcagtgattggcctgtctcaggcccagccagaaagttctgttgtggttgttgttgcttttcttcaaaagtaaattgctctgagaggtcagcacacagtatgatgctaatggaatagtagagatagttttcatgagtctatatatccaaaaaatcccttcaccttccaatgttcaatcatgacacttccctcttatccctttaattagcatgttaattaacagtggctggctgggtgtagtggcccacacctgtcatctcagcactttgggaggctgaggtgggtggatcactgagccctggagtttgagaccagcctgggcaaaacggcaagaccccagcctgggcaatatgacaagacctcacctctacaaaaaaatacaaaaattatctgggcatggtggcccgtgcctgtagtcccaggaggccaaggtggaaggattccttgagcctgggaggtaaaggctgcagtgagctatgatcacaccactgcacttcagcatggttgacagagtgacaccctgtctcaaaaaacaaacaacaaaacaatggctatctctgcacgttgagatttttgtgcctttctgtattttgtaaattttctccagtgaacatttatttttatgatctgattttatgatttataaacatttattttttgccttctccctctaccccccatgcatcctctcccctgcaataaaacctgatgatttcattcagaatacagttaaagacatgctaaaattccctcaggggatatcaaggcctcgtctatggctcagtcccatctgtaagtgaccatcctgactgggggaagtactgtgatgggtgtcttcatccatcaacaaaaatgttcagccaagcaacagaagctaagcaagagaagtcaataggcccctacacttgtacagctacacacaggagtctcagtctccacagaaagttgtcccaaatcaccaacttgggctggatgccagtggtgccccattaacactccgtggtgttcctggtgggagaaccagagtgggcaccagcagctccatgaaccaggactcaaaccggggagcaggaaggaaatgtcttggtcaacacaaccccagcctactcctttccactacctagaaacaggacgccaagagatgatactttccaggtgaacaggcaccaaaagtgtgggattctcagattgagaaccagagaatatttagaatattaacattggaatttagaatggaattcagacatttcagaggctcagagaagcaaaacgatgtctcctaagtcacacagcttgcaaatgacagaggcaagactggactgtaagtcccttgagacttcaagtaaattatgtttcaataggaaagaaagaaaattcagcctatagatatggaaaaacacagcaatattagcagtgtctgtggtcatgaagtcacagagatgcaagattggactctaagtaccttgtcatgcaaaggcatgacatcacactggaaaaagcacagggacatcagaaccaagtgtgcctcaccttcctgggaccagaatcgccccctcctggttccttagcccaggatagatccactgggtcatgtttgggtacaaagagatcatatttagcagcacaaaaattggaagactgcctcctgttctagctaagaagctggatttatttataaataaacttatttataagagtctctgtcctcctaactctaagcaggatgtctgttccctcttctaaattccacttctctcccatgaccctaaggagggtcactaacctttggaacattatccagttgccccctaaatattttctactccctatagcacttaaattcacatgtatattacttattggatgccttctaggactgaattctagtcatatgtctcttttagtaaattgaatcccatcaacttgatgttctaatatttcagaatggctagaacctagtcacttaggaccttttcctcaatcccttcaaatctttggcagccagaggtgacattaatagtttttattatctatggcttttataaatcagattaatcagttgccttccaagttttttttaaggtgactgttgtaaaggagattcattattttcatattatcagatcaggggaaagcaggatccatttttcatcctattgagaaattagcttcatttcaacaatagttttgaacctagaaatgtcaatgtcttcttatcaggaaatctgtattatttcacaggcatggaaggcagcagcccatagactggaagggctggaggcctttctaaaacccctctcactgctgtgcaatattggccatgctgatagatcctgatgcagcatcagatcaaacagaacccctgagatcactcatacaatccaactcctggatgcagactgttgctgatatgccactgtcacctcatatggcctgagacattttaaaaatgcttagttgtagggcagcaattcacccctctttgcccaggacaggagcagtttccaattcttgtactggcataattatcaacatagctttatttaattcactctaatgtcatgatttgggcaatatataataaaatggtcatcctatttactgatcatctagtctgtccacttcttttcatacaaggggaaactaaaccccagggaagtgaatgacagatatcagctcccaaagggaggtgatggcaccaactgaccaccccaaccaccagccagccaggctgtactggcatcttcatgacttcatgactacagacattctgctaacattgcttgtttttccatatctataggctggattttctttttttccaattgaagtataatttacatatttaaaatacacagtttttaaatgttcagtttcacgaattttaactcccaaaacaacatacaaaatatttctgtcaatcctgaaaatttccactgggcccctttcagtcaattctcccaccttgaggaaaacatattctgatctctggccccaccaattattttgcatgttctttgacttcatataaaaggaatcatacagcttataggtctggaaggggtggtggagggaatgtaatcattataaaatatacccagttcgagccttatctgtaataaaggcccactctccagaggaaaatattttgccagcgccttataccagcttggggaagagaattcctcccactctagcctgctgtagccttcctgtcttacctaagagagaaaaaaaatgcaatccacagagctcagagcttcaagaaaatagattgggagtggtgcagccagggataggaaagagaactaaagggaaaagaatatgactgaagaaacacttgtgaagttcacctctctgagacacaggcccactaaaagactgagattcaggttagagaatgttctttctacatataccttactactacaccaaaagaatactagtataaaacaggggcatacagccgaaagagccacaaaaacatagacactgtctgagaaggaggacttacgaaagcccaaagtcaagaggacacaaaaacaaggataatacaagaagctgaagcctttggcacctgtaactacagcacatattaaacacaatccaagtcttagtcaaattaatgtaaattctcacactaaaggcctatttagctcagtttctattacccaaagcagcatgcttggctttcaagaaaaaactataaagcaaaacaaaatgaaaaaaaaaaaaccaacagaatccaaagagacaatcattaggtcagaaataatacagatgttggagtaacaaggaattttaaataactatgattattatgataaggactctaatggaaataaaagacaacatgaaagaacaaatgggtaatgggtagaaatggaaacgctaagaaagaatcaaaaggaaatgctagaaggtagaatggtggttaccaggggctagggaacggggtttggaagatgctggtaaaaggatacaaaattttggttaagtaggaaaaataaattcaagaaatctatttcacaacatagtgattatagctaataccatgtattgtattcttgaaaatcactaagagattttaagttttctcatcataaaaaataagtatgaggtaatgcgtatgttaattagctcaatttagtcatttcacaaggtatatatgtttcaaaacaacatattgcacataataaatatatgcaccttttatttgtccactaaaaataattaattatttttaaaaggaaatgctagaaatcaaaaatgctataagagaaatgcagaatgcttttgatgggttcatcagtagactgaacatagccaaggaaagaatcagtgagctcgaagataggtcaataggaacttcccaagcagaaatacaaagaaaagaaagagtgaaaacaatagtaacaataacagaacgttcaataactctaggataatatcaaatcgtacaccacatgcataattgcaataccaggagaataaaaatgtaatgaaacaggagaaatatttgaagtaacaactgttgagaactttccaaaattaatgacaccaaaccacatatctaggaaactcagagaacacgatgtttttcagttctgctactttatcactgatttttctgtcaattgttgagggggaataaaatgaccaattatgactgtatctttgtctgtttctccatttaaaaggtcaattttatgtcttaatatttaagttatctcattaggcataagtacatttaggaatattacattttttcatgaattggcccttttattattataatatatccctctttatctctggtaatactcttgaagtcactttttaatatattaataagctacccaaactttcttatgcttagaatatggatggtataggttttccacccttctacttttgatctgtttgtatcttcataaagtgtgtttcatgcaaaaatcacatagattgtgtgtgtgtgtgtttatttaatctgacaacaaaggtcttttatgtaggatattcagataatttacatttaatgtaaagtttactggaaacaatatatttgaacagatgcttcatcaaagaagacatgcagatggcaaataagcacatgaaaatatgctcaacatcattagccactagggaaatgcaaattaaaacacaatgaaatgccactacatactcatataaatggctaaaatcaaaaaggctcactaccaaatattggtgaaaacacagagaaattggttctctcatacactgctggtgcaaatgtaacatgatacagccacctcgaaaaacagtttggtagtttcttaaaaagttaaacatatatctactctatgatcttgccatcctattcctttttatttacccaagaaaataaagcatacgtctatacaaaagtttgtgcacaaatgttcacagcgtcttcatttgtagcagccagaaactgtaaataaccaaaatgcccgtcagcagatgaacggataaaacacacagtggtggccaggtgtggtggctcacgcctgtaatctcagcactttgggaggccgaggtgggtggatcaggaggtcaggggatcaaaaccatcctggctaacacggtgaaaccccgtctctactgaaaatacaaaaaattagccgggcatggtggtgggcgcctgtagtcccagctactcgggaggctgaggcaggagaatggcgtgaacccgctaagcggagcttgcagtgagcagagatcgcaccaccgcactccagcctgggcgacagagccagactcagtctcatagaaaaaaaaaacaacacacagtggtatagctctacaactgaatactacttagcaataaaaagagaggaactagtgatatgcccaataacatagatgaatctcaatgtaattatgttaagtgaaacaagccaaacctaaaagagtgcgtaaatactgcatgattgcattcacataaaatttttgaaaatacaaactagagtgacagagagcagaccatcagctgcatgagaatggaagggtaggtgaggagggttgagagggaggattacaagtggacagaaagaaacttttggaaatgatagatacattcactactttgtggtgaaggtttcatgggtgaatactgatgtcaaacttatcaaattttatactttaaatatttgcaatttattatgtcaattatagctcaataaaactctaatatattttttaagttatttggagtccagttggtttcttatccctgcctttgtgtgttctcccccggccactgcactattcctctttcctaggaaaagctcatcactttctgggttatatttgcttcaggtttctttccatccttggctctctgattttttatagtaaagtttatgtaacatacaatttataattttaacaatgtttaggtgtgcagttcagtggaactaagcacatttacattgttttgcaaccatcaccaccattcatctccagaactttgtcatcttcctgagcagaaactctgtctctgttaaacaattcccatttccctctttccccagccctgggcaaccaccattctactttttgtctccattaatttgactgctctaggtaactcatagaaattgactcatataatatttgtccttttttggctggcttatttcacttagcataatgtcctcaagattcatccatgttgtagcatgcgtcagaattcccttcctttttatggctgaacaatgttccactgtatgcaaaccacacgttgtttatccgttcatccattgatggacacttggatggcttctactttttggctactgtgtctgatgggttttttaagttatggttttgtagcttatctggcttattcttctttttaaggtggaaacagtggtattttgcaacctcctattccctgacaagaattagaagtcctctatatattgagttataatctcattttttaatctggcacaaaatcctagaattgaaaatatatccatggcctatcaaagaacaataacaaatcattaaaaaaatccataagtaataaagcctctgatttctaaaagagtttatgtttttcaatgtctgtgatgagatacctgcagcacaaataggtatgcagtcacagctgggtagaaactagaattcacatgcttcgattcttagtctagttgctctcctgcgacattgtgttgtctccatagcattagtgggagatgtaacatcaaattgagacatgatttcaccaattagtccatttttaaataagctgatatgtaagtttaacaaaattccaatagaaatttcaaccagataatggtaatagaaggcagagatcaaggcaaaggccaacttaacttgacaaaatgactattaatctcagcctgaagaataaccatcaaaaaaatccaaaaattattgaaaaacaattagtaatgaatgactagccttggcagatattaaaacatattaaaaagttactataattaaaagcatattgctagtgaatgagcagacagaaaaatcaatatgttctcttcttaacagaaattctgaaagcagatccaagaattcagtatctgattttaatgacattttaaatcagtgattaaacaaatggtattgagaaaaattggctaagcacctgggaatgaatagtaagaatgttacggtcattcagatttccatatctaaagagaggttgttgttgccattctcattgtactgttgtttttaacaccatctctcatgtttccattaatataatctgtcccattgtatttatttttttgtttcattcaccaggaaatttttaccagatcactcaaacatttggataactaatcaccttgtaaacagtcatttacccaaagtaagcaacatttttactggcaaatttttacaaattgggatttctttcataggacaagctgcaatggaaaaacgaaggaatattctttagatattttcaaaactgacatattatttacaaatattcaacaaacacaaattaaattcattctacggggccatcagtgtgctaagtcctgaggatacaaaaatgataaggctcagtcctcccttcaaaacactgtttaacccatcagttatgtcgatagtctgtctgcaatatacgtcaccaatttgctcattgttagatcacattgtttggttgtaataataagagcgcatggggtaaaaatatgaaatactagacaaaaatctaaaattccagaaaaagtattcaatatagattttgcttattagatctgtgcagagattaagcaagatcattagcatctgatacctgtgtctgaggatgttcactctagcagatttgctgaacgagatggatcctcgagtctttcccctctcgccccacaaagcagacacagctggatgctttatcattgctctaccctctccctgaacaaatctgacaagctgatcacattaggccgtgacatacaaaatatggcataattgtagactgtaatcatcacgatgatagctgacttgataagagaggtcaaatcccatttttatatcctgaattcctaaaatattgtttcgtcaaaaaaatcaatttctcatttttctagcgttaacttgaaaagggtataattgatcaagcctaaatcctttatatcacccaggactgtgtgaaaggctcagacccagcaagccacttgagttagggcccggcgaacagcagttgtctccagcatctaacacccatgggcctgaacggcttcaaagcaagaacacgttttatatcccttggttaagactgtggggaaaacacaggctcacggaatatagatgctcagctggctcatttgggttttgtggtccaatttgtggatgagatatttataaaatccggtgattacaatgccatctcattaacattcgttaaatgaaaaccacaaagtgcaggatgagaactccagtctgaggggagaggaagaagatgcatagggaggctggttttgctacctcagcacaggctaaaagagagacctgagacagaggacctctcccacttcctttaagtaagacatgtgactgaaggacaaagggagggaagaggaaggagggtagcttttctatttgtcagtttttttccatctctgtgcaaaccaaatctaagtcaaggccaacccgattttcctatgaattcaaattctccattccttgtaagatttagccaaggagacatctcctccaggatgtctgcctaggctacatttacccccatgagatctttgcatgctcaataaggctgtgtggactggactccactcacagtatttcagcacacagctgttgttcctgccttgtgactgatttctgcccctgtccctgtggggaggagtgtggcttcatagaaccaaaactacagtgtcagaaaagcctggattccagtctcagctcgggcacaaatagtcccagaacctctggtaatattcactttgcaagaaagatacaggggcagggattggtggaggggagattatgcaaattccacaatatgtatctagcaagtgggcacccaatagtagttataattattattattttattaatattgctgacttttctcttttagtcaatctcaaagtcacaggcagtttagataatgcattctatgtagactcagcaataggataattcattcagtggacagttagtaaatactaactaaatgtatgaatgatgctacatccactaggagaacatttcaaagttgggctccatcttcagtgatttatcaaatttagtgattatggctactctgtgtgcagaaactttacttaaggactctgcaaaattttcagacaggtctgtcttccttcttggtcaaatatagaaaagtctagatctccagctttcttctctcctaacaccctactgcaccctagtccccatgacaggcacaaatgcacacacacacacacacacacacacacacacacgcacacatgcacacatacacagagccaagattgactcaatggtgctgactcactaaatggggagccagaaatttcaaaggaatatgcagaggcagagactatcagacttctgccgcactgtcaaccaaaaatcctgacccatgtctgtatcttttgtgtatttgggggtgacaggcagagggccatcagccagaaagaactgtttctgtgactttaattccatggggccttttgtgcttttcttctgcagaccagtgctgcatgtataattaaccctctgcaggctgagtaactgaagcacaagactgctgtccagaagaagcagaagactgaggctgttctcctgagggccaaatagagaccaagaagaggaagttacaagtgtgaggacgattttctaaccctactagcctgaaggcaatagaacaggctgcctcggaaggaaacaaaattttccagatgatgacagaaactgttggagagattcttgcactgggaggaaacagaagtggctagcctctggggttccttaaccttctcagattcggtaagcaggcaccactgaaaggctgggaggcagaagtaaagtgagcacctttgatgcagtagttttggagccattaagaagctactgcacttccctgtttattatgtctaggttcatatgagagagtagattgttatacacagagtcacatcattctattcattaaatgctttcaccaagggacgaagaggtttggagaaaatattttgtttcatttttcagcacaagaatcttaaaagccttgacttgtcacctaatggttccttccttacagctggaatatccttaaactccttgttcgaacttccaaacacacactctccttgtccctacgtttccctctcaattccaccctatgaagcttaagtagaataagcagcagacagcctggtatgattttaaagacatccaaattcccttccacccaaaatctagctcctctacctaattgcaactgtccctgaaaaaaaaactgccatcagagacacgggtttaggtcaaagcaattattcaagaaggaccctggcaagtgcacaataagcaccataaacctagaggcacacattatttttaccaacttcctagcaaagaaagtgtcctgaaaacactggtagcaagaccagaagatctagatgagggcagggttggggaggaggccagtatgcaaggtgaaagatggatcatagagttaagagaatggcaaaaccacgagaagtatcaaagtaagggaggggagatgagtagccaacagttctggagtagagtggaaacacttcctgagtggctattctgttctgagcactgcatattgtactgaaaaacgtcatggcctttgatgtcagccaggcctgtgctcggtcactaactcagcttactcgtggtcaggtatttaagtccatcagctctggttttctcctttgttttgccggggaattaaatgagataactgtgcatgacacagtccttggcacatacatgttattcttctcaccctcccttcaccctacttctacaatttgacaagattgactcttgtctctttgctagaggttctagctgttccagacaaccacactacccaaagcacgttcaatttcaggaaggtgctaaattccactagccctgggcctcaagcaagcatccatctccagaatctcagcagaggagttctgcagccatgctcaatggtgaatactatttttctttgaaaataatgacagggaggcagagcaagatagcagaatagaaggctccaccaattgtcccccctgcaaggacaccaatttaacaactatctacacccacaaaaaaagcaccttcataagagtaaaaaaccagatgagcatacaccgtacctagtttaacttcacattgctgaaagaggcactgaaaaggtaggaaaaaccatcctgaatagtcactgccactcccacccttctccatgcagcagtagtgtggtgtggacagcatttttgcttgctgaggagagggagagtacagcaattgtgaagcattgaaatcactgctgcagaaagtggaatcagactgaactcagctgacacccacccacagacagagcatttaaaccagccctagccaggggagaatcaccaatcccaatagtcagaacttgagctcccactagcctcaccaccacaggctaaagtgctatgggtacctaaataaacttgaaaggcagtgtaggccacaaggactgcaactcctaggaaagtcctagtgctgaactgggcccagagccagaagactggcatggaacatgacttactgtgagacactagctgagacagttaaggaagtgctggaatcaccacctcccctaaccccaaactgcacagatcacagctccaaaggagatccttcttttcttctacttgtaaagaggagaggggagagtgggaaggactttgtcttgcatcttggataccagctcagccacaccatgatagggtaccactcagtcatgaggctccctttccaagccctagttcccagatgacgtttctagacacaccctgggccagaaggaaatccgctgccttgaaggggagaaaaaaaaaaaaaaaaacagccctggcaggattaatcaccagctaacaagagtccttgggccctgaataaccagcagcaatacccaggcactacatagaaggccttgggtaagactctgagactcactggcttcaggtgacagtcagcacattcccagatgtgatggctacagggtgagactctttctgcttgaaaaaagtgaaggaaaaggaaaatgaactttgtttttcacctaggtaccaggttggccacagaagggtagagaaccaagtaggctcttgggatccccaattccagaacttggctcttggatggcatttctggacctgccctgggccagaggggagcccactgccctaaagggtgagagggtgatttccaggccaggcagcatttacaagctgactaaagagcccttgggccttaagggaacatcagcagtagtctggcagtaccctccatgggcctgtggtggtgatggccatggggtgaggctcctctgcctttggaaagaggaaagaagagtgggaaggactgcatcctgtggtttgtgtgccagcttagtcatagaacaccaggtagacgtctaaggtttttgactctagtccctggctctaggatggcacttctggacctaccttgggcctgggagaattgttgccctgaagggaaggacacaggcctagctggcttgaccatctgctgactgtagagtcccaggaccttgagcaaacatacgcagcagcaaaggagtgattactgcaggccttggatgagatccagtactatgctggcttcaggtctgacccagtacagtcctagtggtggtagacacaggggtgcttatgtcactccatccccagttccagatgacttagaacagaaaaacagacttcattagtttgtgagaaagtaagggaagagaacaagagtctctgcctgataatccaggggattcttctggatcttgtccaagaccatcgaggcagtacctctgtgagtctgcaaaaaccacagccttactgggcttggggtgccccccaaaagcagatacagcttagatcacaacacccaagttctttccaatatctggaaagccttcccaagaaggatgggtacaaactagcccagactgcaaagactacaataaatacctagcccttcaatgcccagacacaggcaaacatctataaaaatcaagaccatctaggaaaaaaaaggcaccaggggccaatcctggagaaacagaaatatgtgacatttcagaaagataattcaaatagctgttttgaggaaactcaaagaaattcaagataacacagagaaggaattcagaattctcccagatctatttaacaaagagattgaaataatttttaaaaatcaatcacaaattctagagctgaaaaatgtaattggcttacgaaatatgcatcagagtcttttaatagcagaaatgatcaagtagaagaaagaattagtgagctagaagacaagctattttaaaatacacagaagaaacaaaagaataaaaagcaatgaagcacacctacaggatctagaaaatagccttaaaagggtaaatctaagagttttggccttaatgagggggtagaaaaagagatggtgtagaaagttattaaaaggaataatagcagagaacttcccaaacctagagaaagatatcaatatacaagtacaagaaggttgtagaacaccaaagaagactacctcaggcatttaataatcaaactcccaaaggtcaacataaagaaaggatcctaaaagcgcaagagaaaagaaacaaataacatacaatggagcttcaatatgtctggcagcacacttttcagtggaaaccttacaagccaggagagagtggcatggcatatttcaagtgatgaagggaaaaaaaccttttaccctaggctagtatatccagtgaaaatatccttcaaatttgaaggagaaataaaggccttcccagacaaatggaagctgaaggatttcaccaataccagacttgtcctacaagaaattctgaagggagtactttaatcagaaagaaaaggatgctaatgggcaataagaaacaatctgaaagtacaaaactcactgataatagtaagtacacagaaaaacacaaaatataacactctaactgtgatgtataaactactcttatcttaagcagaaggtctaaacaataaaccaatcaaaaataataactatgacatcttttcaagaaaaagacagtacaataagatataaatagaaacaacaaaatgttaaaaagcagggggacaaaattaaggtgtagtatcttcattagttttctttctgcttctttgttatgcgaacagtgttaagttgttatcagtttaaaataatgggttataagatagtatttggaagcctcaagataacctcaaacttacacggatacacaaaaagtaaaaagcaagaaactaaatcatattggcaaaatgcctataatcctagcattttgggaggccaaggcaggcggactgcctaagctcaggagttcaagaccagcctgggcaacagagcaaaaccccgtctctgctaaaaaataaaaaattagccaggcaatgtggcatgcacctctaatcccagctagttgggaggctgaggcacaagaattgcttgaacctgggaggcagagtttgcagtgagccgagattgagcccctgcactccggcctgggtgatggagtgagactctgtctaggaaaaaaaaaaaatcaccagagaaaatcaccttcaaatcacctgcactaaaaggaagataggaaggaaagaaagaaagaaggaagagaagaccacaaaacaaccagaaaacaaataacaaaatggcaggagaaagtcttcacctatcaataatgacattgaatgtaaatggactaaatcaaaaagatatagagtggctgaataaataatttttttaaaagacctattgatgtgttacctcaaagaaatacactttaactataaagactctcatagactgaaaataaagggatggaaaaagatattccatgccaatggaaaccaaaaaaaagagctatacttatatcagacgaaaatgcattgcaagacaaaaactataagaagagacaaagaaagtcactatgtaatgataatggggtcaattcagcaagaggatataacaattataaatacatatgaacctaacattggagaccccaggtatataaaacaaatattattagagttaaaaagagagatagaccccaatacaataatatctggagacatcaacgctccactttcagcattgaacagatcttccagacagaaaatcagcaaagaaacatctaacttaatctgcactatagaccaaatggatatttacagaatattttatccaacaactgcaggatacacattcttttccttggcacatggatcattctaaaagaacatatgtcaagtcacaaaacaagtcttaaaacttcaaaaaattaataactttatagctataaaagtgtttacatcaaaaaagaagaaaaactttaagcaacctaacaatgcatcttaaagaactagaaaagcaggagcaaaccaaaccaaaaattagtagatgaaaagagataatacagatcagaggagaaattaatgaaattgaaatgaagaaaacaacacaaaagatcaacaaaatgcaaagttggttttttgaaaagctaaaattgagaaacctttatccaggctttaaaaaaaagagagacgttccaaataaataaaatcagagatgaaaaaggagacattataactgatactgcagacatttaaaggatcattagtggctactatgagcaactatatggcaataacttggaatctagaaaaaatggataaattcccagacacatgcaacctacaaagattgaaccatgaagatatccaaaacccgaacagacaaataacaagtaatgagattaaagccataataaaatgtctcccagtaaagaaaagcctgggacccaatgactttactgctgaattctaccaaacattaaaagaagaacctataccaatcttactcaaactattctgaaaaatagagtaacagaggatacttccaaatgtattctacaaagccagtattactctgataccaaaaccagacaaagacacataggaaggaaggaaggaaggaaggaaggaaggaaggaaggaagtaaggaaggaaggaaggaagggagggagggagggagggagggagggaggaagggacagagggaggatgaaagagagagagagagaaaagaaagaaagaaagaaggaaggaaggaaagaaagaaggaaggaaggaaggagaaagaaagaaagaaagaaagaaagaaagaaagaaagaaagaaagaaagaaagaaagaaaagaaggaaagaaagaaaacaaactacaggccaatatctctgatgaatattggtgctaaaatcctcaacaaaatacaagcaaataaaattcaacactatatttaaaaagatcattcgtcataaccaagtgggatttatccctgagatagaaggatggttcaacatatgcaaatcaattagtatgatacattatatcaacagaatgaaggacaaaaaccatatgatcacttcaattgatgatgaaaaagcatttgataaaattcaacatcctttcatgataaaaaccctcaaaactgagtataacataactcaacataataagagccatatactacagacccacagctagtatcatactgaatagggaaaaactgtaaaccttttatctaagatctaaacatgacaaagatgtccacttttaccactgttattcaacatagtactggtagtccttgctagagcaatcagaccagagaaagaaataaaaggcatccaaattggaaaggaaaaagcaaaattatccttgtttgcagatgatatgatcttctatttggaaaaacctgaagactccactgaaaaactattagaattgataaacaaattcaataaagttgcagaatacaaaatcaatatacagaaatcagtaacatttctttttttttcttttttttattatattttaagttctagggtacatatgcacagcatgcaggtttgatacataggtatacatgtgccatgttggtttgcagcacccatcaactcatcatttacattaggtatttctcctaatgctatccctttcctagccccccactccccgacaggccccaatgtgtgatgttccctgccctgtgtccagctgatctcattgttcaattcccatctatgaggagaacatgtggtgtttggttttctgttgctgtgttagtttgctgagaatggtggtttccagcttcatccatgtccctgcaaaggacatgaactcatccttttttatggctgcataatattccatggtgtatatgtgccacattttcttaatccagtctatcattgatggacatttgggttggttccaagtctttactattgtgaatagtgctgcaataaacctaagtgtgtatgtgtctttatagtagcataaaaatcagtagtatttctatatgtcaacagtgaacaatctgaaaaaaaatttttaactaatcccatttacaatagccacaaataaaattaaatatctaggaattaaccaaagaagtgaaagatctctataatgaaaactataaaacattgatgaaagaaactgaaaaacaccaaaaaatggaaagatattccatgttcatggatgggaagaatcaatgttgttaaaatgtccatactacccaaagtgatctacagattcaatgcaatccttaccaaaatatcaatgacattattcacagacattgaaaaaacaatcctaaagtttacatggaaccacaaaagaccaggatagccaaaactatcctgaacaaaaagaacaagactggaggaatcacattacccaacgtctaattatacttcagagctacagtaacaaagtagcatggtactggcataaaaatagatgcataaaccaacagaacaaaacagagaacccggaaacaaatccacacacctacaatgaactaatttacagcaaagatgccaagaacatattctggagctgagaaaactggatatccatatgcggtagaataaaactagacctttatctcttgccatatacaaaaatcaaatcaaaatggattaaacacttaaatctataacctcaaactatgaaactagtacaagaaaatattgaagaaactctccaggacattggtctgggcaaaaatttcttgagtaataccccacaaacacaggcaaccaaagtaaaaatggcaaatgggatcacatcaagttaaaaaactgcacaggaaaggaaacaatcaacaaagtaaagagacaacccatggagtggaagaaaatatttgcaaactactcatctgacaagagattaataacgagaatacataaggatgtcaaccattctataggaaaaaaatctaatgatccaatttaaacacgggcaaaatacttgaatagacatttctcaaaagaagacatacaaatgacaaacaggcatttgaaaaggcactcaacatcactgaccatcagagaaaagcaaatcagaactacaatgagatatcatctcaccccagttagaatggcttatatccaaaagacaggcaataacaaatgctggcgaggatgcagagagaagagaaccctcatacactgtcagtgggaatgtaaattagtataaccactatggagaacagtttggagattcctcaaaaaactaaaaatagtgcttccatatgatccagcaatcccactgctgggtatatacccaaaagaaaggaaatcagtatatcaaagagaaatctgcagtctcgtgtttgttgcagcactgttcacaatagccaagatttggaagtaacctaagtgttcataaacaaatgaatcaataaagaaaatgtggtacatatacacaatggagtactatttagtcataaaaaagaatgagatcttatcatttgcaacaacatggatgaaactggaggtcattaggttaagtgaaataagccaggcacagaaagacaaacatttgcatgttctcacttatttgtgggatctgaaaatcaaaaaaatggaactcatgaagatagagaatagaagaatggttagcagagactgagaacggtagttgggagatgggggtgagaggaaggggaagaagggtatagttaatgggcacaaaaataattgttagaaagaatgataagacctagtatttgatagcacaacagggtgactatagtcaataataatttaattgtacattttaaaataactaagagggtataatttgattgtagcacaaaggataagtgcttgagggaatagagaccccatcttccatgatgtgacaattatgcattgcatgactgtatcaaaacatctcggctgggagcggtggcttaagcctgtaatcccagagctttgggaggccgacgcgggtgaatcacctgaggtcaggagtccaagaccagcctggccaacatggtgaaaccctgtctctactaaaaatacaaaaattacccaggcatggtggcgcatgcctataatcccagctactcgggaggctaaggtgggagagtcacctgaacctaggaggtgaggttgcagtgagctgagattgtgccactgcattccagcctaggcaacagagcgagagtgagactctgtctcaaaaaaaaaaaaaaaaaaaaaaaaaaaaaaactcatgtactccataaatatatacacctactatgtacccacaaaaatttaaaaagaaaataatgaagcactgcagatggaaccagccattatacaaacaagctaacaaccttttgggaaaccatgtcaaccagacagtgcaatgaaccagccagtggggatgaaaaggtatccacaaggtttactaaatgactgcctttcaagcagtctggactgccttgaaaaggagagaagactggcccaaagactgcataagtttaaacaaatcctcagatcatcaccacaaggctgatgtcaccaaggctgagtcaccatcatacgtgattccagaagctagggctgtaagaagtcactgcactaatgtaaaggcaagaagaacacatgccaaacataatgtctaagcagctgaaggtgctgtggcacttcctgctatttacccaggccaattatgtccggttctagaagaaaatgggatgaactagaataacttctccagtggtaaggagtctggattactaacagttcaagtataaatgtctttatccagttgaatggacctcattcattccatgaacaaatatttatagagcacctactatgtgccaggcactggtgtaggtgctgaggatacaactgtgaatcaaacataagctctgacctcttggatttcacatcttagcaaggagacagacaataaacaaagacaaaaagaaagaacaaagggagggaggcaaaatgtatcactatctaaaattaaaagctggggtcatatgttagagtgactaggtgacctgaatgacaagaagccagccatgcaaacatctgggtgacagctatgagttcttgcctcaggtttcacagaatcatgtacttttcttactgaaagggacctcagtgatcaacttcaacactccattttttatatataatgaaattgagactcaggcaagtagtatgatgtctccaaagccactctgaaaattacacagggacttccctgtttattttcgagaaggcttaaacagacaaaatgataattattcaacaaacatgtattgagccagtacttttttttttgagccctgtaatgaccactctaaattcttcagaggaaaatgagaaatacacaagtgaagtaagcagagaccccttctgtactaactgcaggcctgaccatttgatacaaagtagcaaggaggaagatttacatgggtgattcaccccagaaggctgaatagaggaggtgggatgagtaggattttgataagcaggaaaggcaggagggtgatcccatcaggagaaacatactgaatcagtgcagaaaagacaaagaatggggcggggaggactcagggagtccctaggaaactagggagtagttgaggagggatggggcatcaagactggggatggtgacacctcaaacacagagagagagttgggggaagaggagttgtaagacatataaatgtcaccaggctcaccctttgcccatcactcagtacctatcaccttccagcttgcagaggtgctaacatttgaggtactcaaactcatcttgatccttttttctcatccccttcactttttcttcacaacaggtgctgcactgggtaccctatacatatcagctcaaaataataccagttatccactcattcattcagcacttcatgcctcctatgtgtcaggcatgaagctaagcactttacaaagaatatgtcttgtaagccccacagtaaccctatgaggtaggtacttgtcattacaatcttagctagcaaactgaatctcagacaggttaaataagttgcctgaggtcactcagctggaagacagtggagctaggattttaatctctgtcttttgaactccaaagcccaagcactctctaatttttactatgaaaatattcaaatacaaaattatatagaaagcaaaatcaaactttgcctccttcatcatctagccatcagccagtcctacctgcttgaagactagaggtattttggctccctctgaaattctctttttacctcttgtcaaatttcccagacatagctcaactatggacaacttgtaccaacatttgtttcacaagctattactaagtcctccacacaggaaatatggaacgtatttccacaggtttttgagcctttgcaggtggcatagtattatcagtatcacatctttctgagacacacaaaaaaagaattggttaaaagatggaagaggaacaacagggatgaggcatgagcaagttcagaggacacatgtaagcttcatgaacaggtggtccaggcccacatatcctccacccctgttgccccagcaccatttcttcactgtgagggaggccttcaggaccagctgatgtaggagaaaaaaggctgagttgctgctgcacttcaacacactcttgggtgacccagaagactgcaatgaaggcaaatcttcccagtagtcagagcttcaggtgttgccccatcacccaccttacgtgggaagataagtggtccaaggctaggctatacaataactcatggacaatggcctagctggttattcagagggttggcagatcatttggaagactgaggacaaggaggtctaggaagaggcatgtgaataacctataggaaaagaagatgaatgataaaaatctttatattatttgttgattctcattacatagcatctctgatggaagacaccaaacaaccaagttgacagaatgaattggccaactgacttcagcctattttttttcatcagccactccagtgctgggatggtgcccgatcacatttagtagcagtgattgcacgaatgaagcctatgcatggccccagcttaccaaagctacttgctgctgctgctgctgctgcttgccactgtcatcaccaaatgtccaccctgccagcaacagagaccagtgctgagcccccagtggtggtaccgtccctcaaagagatcaaccaggcatttagtgtcaagtcaattacattggacctcttctactctgaaaagggcagcaatctatcttggctgagatagacacctgttgcagctatgtgttttccttttctgctactgctatccaatgatttgcaaggttttaatgtgccaacatgggattccacaaaacactacctcaagaccaagtgacccattttacagcagaggtagtatgacaaagggatacgtgaccatggaatccactggttctatcacatactgcactactgagaagacactggcctgaaagaccagtggcatgccctcttaatgatacagcaaaggggccattttggatattataccctggaaggatggtgcactatcatccaggactcaacatataccctaaatgacctatatgattctgtgtccccagcaggtagaatacataggtccaggaaccaagagatggaatgatttaccaatactgcaaccagtaatcctcctgagatatttgttttctatccactcaaggttaggctctttagatctaaagatcctaactcccaaaagaggaacacttgtacctggggacatagttaagagtccctttgaactttaagctacaactgccactcaattactttgggatcctcataccaagaaaccagcaataaactaaagaaatcaaccaaccaactagcaagggtaatcgaccctgcccatcaggaggggcttagcttctgctacacaatagaagaagggaagaatatgcttggcggtcaggtggtccactaagaggtctcttgatgttcccatgctcaccacttaatggtaatacacaagaatagcaaccatagactgagaagggcacagtaacttggggctcaggaccctctgggatgagggtttcattacttccagcaggtaagttacccagtgcagcacagggaatagccagagtggaggggaatgagtgtgtttaaaaaaaaaggaggggagcagtaataagccttgagaccaaactgcagcagcaagcgctgtagtatttcttactaaactttcacttgtaagctctcaggaaacgagaccaaccaaaattcaatagaaggcattcccaaacatagtgcagttattataagaagtaagtgggtttgagcgacatgagggctggatggggcacactaaggagatctccacccagatcctctcttcagcacagacacactcaaccccttgctgctaagaatactgagtgctggggactcacagctgagttactcaccagcagttacctcagttgcagggaactgcctcatccaggatgacggcccctcctaggggacagcctatggccaatgactggcttatgaagggatacagacgtctgaccacgtgcttcaaacaggattagctccaagaggctgtcccagctccaaacttctgtgtagagccacctgagaccttttttgccacaggaatacaggtcagttgcttcatcagcttacaggtgtatctcctgaaaacacctgcaataactttctgtgtcaagtctatttcaactctgtttccaagtctgtttcccagtacacaatctcaggcagcctcactcacacccattaccacatgccccaagcagaacagcactggaacagagagcaggagagtttcttgtcttggccccatctcctttaagttctctgtttattcaaacctacctaccctctcaaaacctaggtgggtaatcctccctccatgcctcattttgaatctatgagggtacagagattattaaatatacactttgcaaaacactctgttccttctaacaaaaaaggccagtaaagacagtaaggcaaggacatttctgacattttaatgtcagaaagttcacatgctggtgtcatcgtagactagtccatgagaaagggataagaagactaggtcattaaagtcaaatgactctatgaaggtcatttaacctccatgaccctgttttctaatctattttaaaagcttgctctgactaccctcaaaactttcatgagactcttcttggtaaagacaacaatacctacctcatgggtttcttagaaagactagacgaaatcatatattacaatatctggcacatggtgaacacaccacatatggctaaaatcaaatgataaaatgcctgccaatgactttgaaaactcgaacatgctacaaaaatgacaacaattatgattacagtgcaacatatttaatatataatgttttacattttttcagaggattggccttgtgtccctaacatgaatacagttcctcttttccgtttcttttaactacaaagcaactagtgcagtgtatgccatttggtaaatgcttaaaaccttttgcctgacttgcaaggcagggatcagtgagtaataccatgccttggtaacctgtcactactagaaagtgcttctgtaatgttctgtggaagagagattttttattttttgcattagactggaaaaggggagaaggagctacatttccccaaaccacctgagacatcacccaatgatttcaaatgcacttctatttgtctgaaagtattctattcaagagttacttctaaccacctgatatttcagggtgctggtgtatgtgcacccattttcctttgcattttattaaatgagaaaccaaggattgtatctagcctgtgctcaaactttttaatggaatcaaaatcctctaagattatcttaaatccggttaatatttttaagtgggacctgaatttagccaaatagctgggtggtttagaaacatgtctatctgtctccttaaagtgattccatgaatttggatctctgtgtcactgatccacttcaatgttggcatatatattatgaggaaatacgttgatagaaattcaagaaaccctcaaataagtgccagcatatctctagataaggatattttagacagccctaagctatgtattcccttcccatgagtgaggctttttcccttatccctcatctccctctctttatctattattagtgtcctaatctctgcatcaaccaaacagctttctttcccagagttatctcaaatcttactttctactgccttcctaatacacattaatttccagaactcatctcacttgcaaaacttggaatgtccctcatataaataatcactgcaaatgccaggccaggagctttgttcagcttgatttctccccagaggactgagtccaaagcatgcgctgccacctgttatcatggaaaaagttgtaatcattatagaataactacctaagataggccgggcgcagtggctcacacctgtaatcccagcactttgggaggctgaggtgggcggatcaagaggtcaggagatcgagaccatcctggctaacatggtgaaaccccgtctctattaaaaatacaaaaaattagccgggcgtggtggcgggcgcctgtagtcccagctacttggtaggctgaggcaggagaatggcgtgaatccgggaggtggagcttgcagtgagccaagatggcgccaccgcactccagcctgggccacagagcgagactctgcctcaaaaaaaaaaaaaaaaaaaaaaagaataactacctaagatactctgtagcatttggtgtttgaatgacaggtctctgtttcacagaggaaacatactacagaatttttttttcattcattcctattataaaatgttgtttcttcacattaatgaactacattgatattaccctggaagacctataagattcactcatacttgattaatttgagacactgatccccataaatcacagcagccatatctcaagctgacttttgcatagaacctgaaaacatatccttgcagagttccattccctgagttactgctctatgccagagcaacatgatggaagcattagtgctaaagttttgatagttgagtctatgttccttttcaggatagtgcctgttttttcataagatcttcactggctgaccttaaaaaaaaaatgagaagaaacagaaatttcagatgccatggaaagccaggtaaagggtcattttttagcaaaaaattcagaaactctatcagaccatcccatgtaaatggtcaattttatgtcaagcaaattcttcaatcctcttcaatgctgtgtgtaccaacatgcaaatgacccagctgtataaacagacagtggctcatgagacttaaaggtttcagggctaaagagaaacactcctctcactagcaagaccatgagatgagacacagagtccaagcacccaccatgctgctgtccaaggtcttcattcctgcttcctcctcctcttatccagtctccagatgaatttcacatctgatcctaacacacttaaataacagaacttgtaacagaatgaccatatagagtggtaattagaggcatggtcaggcagacctccattcaaatcccagcttcgccatttattagcagtatgatcaaattacttaacctaattctaagtttccctttctgtaaaatgaggatagtagcagtttctatctcataggtttgtcgtaaggattaaatgagatcaaacaggtaaagtcattgcatgtgctgtcttgtcacattcagctttgcatcccaatgatcagcagagtaatttaaaattttttacatcttgatcaaatgaataaataaatccaaaagagagagataattgaccaggaagcatgagaactatttctagtcctgtcccagacaagtgacttagcctctccagatgttatatacctcattagtgaaatggggataagaacacacagtatgggtttagtcattgcattgttatagccaacatttggccactcagaaatctagccaccaccaaaatatgccagctgcaaaattatcatcagtcttgtcttgtctgactctagtcttcaacatggctgagggtgaggcagggggatccctgagccaagaccaggaactggaatagaataagtaataattgtccttgctttgccacttaccagctgtgagtttcagtagcccattgacctttcctggcttcagtttcttcacagataaaccatgaataataatgttttccctgtattctaccccagtgagttgtagtgacacataaatgagataaagtataacataatactttgaaactgtaaagtgatataaaaaagtattattattaaatttccagcaataggttcttatcacagccatagctggaaggatgctattcaaacctagagatccatttcttctctcactctctcgatctatttctctatctatatactaactacttatctatctatctatctatccatctctgtctcactagataagggaaaagtctttcaattagagattttttgcttcagagttaatgctatatgagttgtaaattatattcaataacaatagtagtttgcattggtagagtctccttcctattgcaaagcactttaaaactgtcacaagctggaattctcacagtaaaatctgtcttgtcacattcagctttgtatcccaatgatcagcagagtaatttaaaattttttacatcttgatcaaatgaataaataaatccaaaagagagagatagttgaccaggaagcatgagaactatttctagtcctgtcccagacaagtgacttagcctctccggatgttatatacctcattagtgaaatggggataagtatagcttgcctcctaatgcagaaagctggaagggagtataaatcctcttattctatagatgaaatgaggataagtgactttatggcctggagttggtaaatacttaacataaatatatgttacaccccacaacacagtattgttttgtgtaatcagtgttcacttatttacccacgtatttgttcttcccaatgctcttcactccttcctgcatttgtttccagatatcatcattttccttctgcctgaagaactctcaaggtctgagagcaacaaagtctctcaattttgtttatctagaattgtatttcttttgccttcacatttgaaggatattttttcactggatataaaattatagttcagcttcttccctcagtaccttaaagatgccattccattgcctctagctttcatattattattctgccaattatatttttggattatttttaagcattgtattttttcacaggctttctgtaaaatttgttagaagcttattatgagagttttctttgtatttatcctttttgaagatcatagaggttttaaaactgttacttgatgcatttcaactgttttggaggatttggggaattatgtcttcaaatattgcttctatcccattttttccctcattctattctggacctccaataatacaggtattaggccttttcattgagttgagtaaattttttatacattttcctatatttacatcctttttccctttcatgctttagtgtaaatgttttctactcaccagtcttccggctccccaaaagagtaacttggacgtctaccatcacctgccaataatgaggcagtcttcctactcttccctgggaaatgtcagaacaagctaactaatgtttaaataaaatccaaagtctcatagcataatactcaaaacatccatgtttcagtgaaaactcacttacacaaataaccaagaaaatatcaacattaattttaaaataagagcaatagtcacatcactaagatgacagagatgttagaactgtataacaaagatgttaaagaatccatcataactgttcttcactgagcaattataaacatgcttgaaacaaatgaacaaatcacctcaagaaagaaacacaagataatcaaatggattttttaaaactcagtggatgagctagacaacagagtggagtgggtagaggaaagaatcagtggaacagaagataaaacaatagaaattacccaatctgaataacagaaaaaaatagactggagaaaaataaacagagccctagggatacatgggactaaaacaaaagagctaaaaatcatataattagagtcccaagagataaaagggcagtgctgaaaaagtacttgaagaaatacagcaaaaacttccaaatttcacagaagacatacaccaaagattcaggaaacatggtaaaccccaacaatataaacccaaagaaatccacactaagacaaatcatagtcaaacttctgaaaactaaagataaagaaaaaatattgaaagcacagaaagagagaaatgatatcttgcctatgtagaaaatacaactcaactggcagtggatttctcatcaaaaatgatgggagccagaaaaaaacatggcacaatatttttcaagtgctgaaagaaaagaactgtcaacccagaattccatatctgcataaaatatccttcagaaatgaaagataaatcaaggctatctcagatgaacataaactaatttttttgccagcagaactaaccaaaaggaatggcttttaaaaatcctctaagtagaaataatattagaaaagaaaaaatattggattatcagaaagaaatatacaaaaagcaaaaatatgaataaatatactaaatttttcttctactcttgatttctcaaaattatggttgacggttgaagcaaaaattataacacagtctgaagtagtattaagtaaatgtaaatgaaatattcaaaacaaatataaatggggaaggtaaggtatgtaaaacaaagtgaagtttctacacttcatttgaactggtaaaatgtcaacaatagcaggctgtgataagttatatatatgtaatataatacatagggcaactgccaaaactatataaagatataaattttaaaatgtagtagataaatcaaaatagaattttaataaattttcaagcaacacacaagatatcaggaacaaacagaaaaacagacaacagaaagcaaaaaattaagcacaatatatcaatagttacattaagtgtaaataatctaaatacatcaattaaaagacaaagattggatgagtgggttaaaaaccatggctacaggaattcgagtccaacatggtgaaaccccatctcttctaaaatgcaaaaattagccgggcatggtggtgtgtgcctgtaatcccagctactcaggaggctgaggcagaattgcttgaaccaggaggccgaggttgcagtgagccgagattgtgccactgcactccagcctgggcaacacagtgaaactctgtcaaaaaacaaaacaaaaccatgacctaactatatgctgctgtctacaagaaaaacaattcaaatattaacataatgaaataggttgcaagtaaaatgatagaaaaggatatatcacgtacatatcaatcaaagaaagcagacatggctatattaatatcagataaagtaagtttcagagcaaagaaaattaccagcaggaagaacattacatcatgataaggtcaatttaataggaagacatagcaatcctaaagagttttcaccagactcagagctgcaaaatatgttaagcaaaaactgacaggactgaaggacaaatagataagtccacaattatatttggaaatgtcaacacctctccctctctcagtaattgatagaacatctttttaaaatcagcaaggatacaaaactcaataacatcatccaccagtaggaactaatcagcacttgcagaacacaccactcaaaaacaggaagtatatacattattttcaagcatttatggaacataaaccaacatacaacatatgatgagccataaaacaaacctcaaaaaatttaaaacaattggctaggcgtgatggctcacacctgtaatcccagcagtttgggaggccaaggcgggtggatcacctgaggtcaggagttcgagaccagcctggccaacatggtgaaaccccgtcactactgaaaatacaaaaattagccagcattgtggcaggcacctgtaatcccagctactcgggaggctgaggcaggagaatcgcctgaacctgggaggtggaggttgcagtgagccaaaattgcaccactgcactccagctgagcgacaagagcaaaattctgtttcaaaaaaaaaaaaaatttttttaaacaattgcaaagatagagtgtgttatttgtccacaaaggaagcaaactagaaatcaataacaaaagtaacaggaaatcttcaaacacttggaaactaaatgatacacttctacacttcattaaggagtccaaagaaaatttaaagatacacagaactaaatgaaaatgaaaattcaatatatcaaaagatgtaggatgcagataaagcagtgcttacagggaaatttatagcactaaatgcttacattagaaaagaggagaagtttcaaatcaataatctaaactcccatcccaagaagttgggaaaagaagagcaaaataaacccaaagcaagtagaagggaggaaataaagagcagaagtcaatgaaattgaaaacagaaaagcaataaagaaaatcaatgaaacaaacagctacttctttgaaaacagatcaataaaattgacaaatctttaactaacaaagaaaaagagagacaaggtacaaattcccaatatcaggaatgaaatagtggatatctcttcagaccctgcagaaatcaaaagtataataagaaaatcatatgaataattctacaccataaattttaaagcttagatgaaatttaccaatgcctcaaaaagcacaaattagcatccagtatgaaatagattgaatagtgctttaattattaagaagattgaatttacaagtttaaaattctcaaaaaagaaatctgcaggtctaggtgatttcatcagagaattctactaattgttcaaagaattaacatcaattccttttttaatttttttatttttttaattgacaaaattatatatgtatatggggcacaacataatgttttttgttgttgttgcttttgtttgtttgtttgtttgtttttttgagatggagtcttgcactgtcgcccaggctggggggcagtggcgcgatctcggctcactgcaagctccgcctcccgggttcacgccattctcctgcctcagcctcccgagtagctgggactacaggcgcctgccaccacgcccagctaattttttgtacttttagtacagacggggtttcaccgtgttagccaggatggtctcaatctcctgaccttgtgatccgcccgtgataatttttgtgagccaccatgcccggccatactgttttgatatatgtatacattacagaatgggtaaaccaagctaattaacatatctattacctcacatacttatctttttttgtggtgagaatatttaaacatctactcttttagtaattctcaagtatacaatgcactgttattaagtacagtcaccatgttgtgcaataggtctccagaacttattcttcctaactgaaattttgtatcctttgaccaacacccctccagcccagcctccacaagcccttgataaccaccattctattttctgtttctgtaagataatttttgtagattccatatttaagtgagatcatgcagtatttttctatgtccggtttatttcacttagcataatgtcttccagatcatacagtatttatctttctatgtctggtttatttcacttagcataatgtctttcagatttatccatgtcattttatccatgtcacacacaaatggcaggatttctctcctttttaaggctgaagagcgttccattatatacatttctccgcttttttaggatgaatatgtatatatatattcacacacaaatgcatgcacacacacacacagtatatatatatatatatatatatatatatatatatatatatatatatatatatatatatgcgtgtgtgtaagtgtgtgtaggtatatatatatagtagtctcctcgttatccacaactttgctttctgtggtttcagttacccacagttaaccacagtccaaaaatattacatacaataagatatttagagagaggtagagaaagatcacatttatataacatttatttaagtatactgttatacttgctctattttattattacttactgttgttaatctcttgctatgcaaaatttataaactctatcatagatatgtatatataggaaaaaacatagtatgtatagggtttgatagtatgaaaagtttcaggcatccatccactggaggtcttagaatgtatgccctgcagataaggggggactactgtgccacattttctttatccattcatcagtcaatggatccttaggtcgattctatatcttagctactgtgaataatgctacaataaacatgagattgcagatatccctttgacatactaatttcatttcctttggatatatattcagaaatggaattgctggactatatggtcattctgtttttaattttgtgaggaatacccattttttaaataatggctgtactaatttacctttccaccaacagtatagaagtattcccttttcttcacatccttgtcaaattttgtctcttgtctctttgataatagccatcctaataagtgtgaggtgatgaattaaacaccaattctgtgaagtctcttcaagaatgagagaacaactctcaattcattgtatgaagctagtattattctgatatcaaatacagacaatgacaatataaaaaaggaaaactacagaccaatgtcctcatgaatttagatgcaaaaatcctagcaccaaaatatgagcaaatggaattcagcagtatatgaaaataattagacaccatgaccaagtggggtttattccagggataccagcccagtccaatactagaaaagcaagcaatgtaacccaccatattaacaggctaaagaagaaaaattacactattatatcaatcaatgtataaaaagtatttgacaaaattcaacctccattcatggtaaaactcttacaaaaataggaatataagagaacttcctcaacttgataaagagaatctgcaaaacccaacagctaacattatactaaatggtgaaagacaatgtgtttgcccctaatattgggaacaaaggaaggatagtcactgtcaccactcttattcaatatagtactagaagtactagccagtaaaataaggaaacaaaaaattatgcagatcagaaaggaagaaatactttgatccttatttgcatgtgtctaaatgtttatatagaaaatcacaatgaatctattttttaaaattagaactaataagtgagttcagcaaagttgcaggagacaaggtaaacacacaaaaatccattgtatttctataaatagcaatgaatatatggctatcaaaatgttaaatataatatcatttataatttttatcacccaaaacaaaattattggggaaaatgtaacaaaatatatataggacttgtatgctgaaaactatgcaacactgatgaaagaagatataaataaatgaagacacatatgtacatagattggaagactcaacatactaaaagatatcaattcttccaaaactgatatacaagtttaacataattccaaccaaaatcccagcaagatttttgtagatacacacatgattatcctcaaatatatatggaaaggtaaaagaataaaacagataaaaccattttttaaggaaagaataaagtgggaggaattagtctacctgatttcaagatactgtctagctacagtaatcaagactgtgtgacattggtgaaaagacagacgcatagatcaatggaacaaagtatggaacccagaaacatacccacatatttatacccaattgatttttcacaaagctgcggacacaattcaactgagggaaagatagccttttgaatgaatggagctgaaacaattggtcatccacaggcaaaaaataaaataaaaaaagacctaaacttcacaccttattcaaaatcaactcaaaatggatcacagacttaaatgtaatatgtacaactaaaaaactatataactacagaaaaaaatgtgagaacatcaggctctaggaccaggcaaagtgctcttagccttgaaacagaaagaatggtccataaagaaaaaattaataaattggactccatcaaaattaacaatgtttgttctgtgaaaggtcctgttaacagggtgagtaaacaagctgcacactaggaggaaatatttgcaaatcacacatctgacaaaggactactatctagaacataaaaagaattctcaaaattcaacagtaaaaaacaaaaacagtaaaaaaaaaaaaaatccaattagaaaatgagcaaaggtatgaacatttactgaaacatatacacagatgacaaaaaagcacatgaaaagctgtccaacatcattagtcactagagaaatgtaaattaaaactaaaataagacattatatacttaccagaatgactaaaatgaaaatatcaatacctaagctggcaaagatgtagagaagttgaatcacatattgctggtgggaaagtaaaatggtatactctggaaaaaagtgtgtaatttctttaaaacatgaaatatgcaactaccaaatgacctagcaactgcactactgggcatttatcctagagaaatgaagacttatattgacacaaaaacctgtacataagtgttcatagcagctttattcataagagccaaaaactggaaaccacattcaaatgctgaatagttaaacaaactgtggtacatttgtgccatggaatattagccataaaagggagcatattactcatatacacaacaaactagatggatctccagagaagatgaataaaaagccagtctcaaggggctacatactatatggttgcacttatgtaatattcttgagacaacaaattatagaaatggatagtagactagttagtggtttcctatggataatgagggaatagatatgtgagggaagtgagcatggctataaaaagtcaatgtgggggatccttatgatgatggacatgttctgtatcttgattgtattgatggtaatatcctgattgtgaaattgtacttagttttaaaagatgttttcattaaagaaaactggataaagtgtacaagggatctctgtattatctcttacaactacatgtgaatctacagttatctcaaaattaaaagtttaattaaaaattgggaagtacagagttaccagttactttgatgggaagactgtgagcgcaattttgggaagtagaaatcaagagtgcttagacatgttgagttttaggtcattgttagagacccaaatatcaagtgagcagttggatatatttgactggagttcagaaaatagttctggactgtatatgtaaacatgaatatcattagcaaataaatgttacttaatgctatggaagatctccttgcataaggaggaaaagaatatagaatcaaaacaagagaaaatctaagatcaagccttaaaaaattccatcatttagaagtcaaaggagacagaactagcaagtctggaaagactgaccagagatacaagcagaaaagcatgttgtcacaaaacaacaatcgaagggtgttttgggccaggcgcaatggctcatgcctgttaataccagcactttgggggacagaggcaggcggaatgcttgagcccaggagtttaagaccagcctaggcaacatagcaagacctcatctctacaaataataataataaaaaaaacatagccaggcatggtggcaaacctgtagtcccaaatactctagaagctgaggtgggaggattgcttgaacccaggaggttgaggctgcagtgagctatgatcatgccactgaactccagcaagaccctgtccaaaaaataaagtgtttcaagaatgcaaatgtgttgtccacaaactgtagttgagaaaatacaagataatgggaccagacttataacaatgaaattgcctagtctctgatttgcatgatctaatgcaaaaccgtctgtgcaattttaagtatttttgtttttctcatttttttttttctggtcataggagaaggagcaaaatcataggctctctttttggacctagtttcattacctcaactgacactacttcctaagaaaaacattccatttttttaaggcagggcttacacttactctccttcatgttcatttattggactcaacctctgctgtcctctgctattcttctaccctcactatctcctaccattctgtccctgctcacactgtgtgcaaacatcctaagcacatgcctcactggtttgttcttctcaatctcttttggtactctccttacatttccaaacagttccagatccttacgttttccctatttagatacactctctagattatctcaaccagtcctatggctttcacatatcacctatacacaaacaactcttaaatttctgtctctagccccaacttctcaccttgcctcctgacttatatccaattgcctgcccaatatctatctcctcttgaatgaataatagacacttatagttaacatgcacaaacacttgatttttccccattcccaacttgttcctctttgtcttccccagctttcatggagctccctaataaatggtgtgatagttttaaaacatggtcccaaattctttgatgctccaatgtcccctcctccttgaatctggaatgggcctgtgatgaattctaaacacagaatatggtagaagtgacgttatgtgacttctgaggctaggtcataaaaaaccatgcagctttttcctggttgtcttagaatgctcattctatggacacttcctaatggaatactccttcttaaagcccagccatcatgcagtaagaagcccaagccaatggagatagcaaaaatgattgttgtttaagctcactactttggggcattttgtagtgatagagaactggaactgatggaacctgatggtagctttattgtttcaatttttgagaccagaactctaaggtcatccttgacgcctttccttttctcacattccatatccaaaccattagcaaatcctgtcagctctctcttcaaatatgccccaagtctgaccaattctcaccaatctgaccaattctgaccagtatctcatctataaagtgaatctctcctaggcagagattcttggtgggaaacaacagaaactgactcgagctaattttcacagaaaaatattaggcaaaaggaacccagattactcacagaatagactgaaagggataagaaccaagttcagaaaaggatctgaaatcaatgggggttaggtgcaagaaccacagccagagaaccagctgggttggcgagctgcctctgttggacacagaacgcaccaccacaccagtgcaagttgtaggctgtctccacgccatggtctctctggcatctgacatccaaggaggtgtatcttactggttggatctagatgacatttctgagtcacagctatcaggggatggggaaaaagagagtttgggctttttggatttcacagtaagaagtaggatcctatcttccataaaaactcattttacatttcacagtgcattttctaaacacaataagtgggtacaaattctgagcagccaagtaaaagtgaatgtctaagggttgggtgaagagaaaatgaagtattttctattacaaacaggctcccaatgtatgttaatgtgttggaaatataactacattgtgaattaaagccttggattcaagtcctgttctaccacttactgaatgtgtgacccttaaccaattccttaagttcccagagattaaggtttttcatcttcaaaatgggaacaataacatcactcccacttatcttacatgctgttttgaggatcaaatgagtgtgtgaatactttgaggcactcttttagttctcattcatctttgtaacatggttgcctagcttaaggccagcctggagtaggtgttctataaatgttccataaaggtccagaattagcaataactacagaaagaatttgtaaaatgaaagccattaattaatttatgcaaataagtcatctatgtaggccagaaaagtatgatattgtcatccagggccagacttttttttttctttttttttttttgagacagtcttgctctgtcacccaggccagagtgcagtagcgcgatcttgactcgctgcaacctccacctccaaggttcaagcaattctcctgcctcagccccccaagtagctgggattacaggcatgtgccaccatgcccagctaatttttgtattttttagtagagacggggtttcaccatgttggccaggctggtcttgaactcctgacctaaggtgatctgcctgcctcatcctaccaaagtgctagaattacaagcgtgagccatcgtgcctggcccagggccattcttaagaaatatcaagtatgggaggaggccctgacactgatcatttttgccactgacctctttataaaataaatatggaaatagaagaacaacttatgcttcattatatagtacaaatttggttcacagagaaaactccttctgtgacaaattttagggactcattaatagttcttgggaattatggtaccatggggaagttatatagcttattgtctagatctctggccaatggattcaagttatcctgagaaacaagaaatatcaaactataggataactaataatacaagtgcacaatctcttaaccaaatcctttagagacagatgctttagaattgagaatttttcagatatttgaaagattttagcggtaaatattatttattacataacccccagcaaggtctggggcagcactttctcatcaaacacaacaatatttctgcacaggtatgtgtgaatactaattctaagtggaataaagactataaaaaggctgagtgcagtggctcatgcctgtaatcccagcactttgggaggccaaggtgggcggatcacttgaggtcaggagttcgagaccagcctggccaacatggttaaaccctgtatctactaaaaatacaaaaaaaaaaaaaaaaaaaaaaaatagccgggtgtggtagcatgcacctgtaatcccggccactccagtggctgaggcatgcaaatggttcaggagggaggcagagattgcagtgagccaaaattgcaccactgcactccagcctgggcgactgaggaggctatattaaaaaaaaaaagactataaatagcttcatatcagttcagttatggttacttcaacatatgaaattcaaaaaaacttctggtttttagagctttttggaattttagaaatgcagacaagaaataattcttgtactttccataaagaaattgtacttttcataaagaaatggtttttatagagatagaaaatgctccatcatgtacttttaacgtctttataagcttgaatattaatattagtctaacccttaaaattatctacataaaattacgttcacaatatcatttttaagttttatttttaattgaaaaataactgtacatatttacggagtacaacatgatgtttcaatacatgtttacattttgtaatgatcaaattagagtaattagcatatttggcaactcaaaaatttatcatttctttgtgatgagaatatgcaaaaacctcttttctattttgaaatgtataatacattgttattagttatagtcgctctactgtgcaatagaacaccaggttttattcctcgtatctaattgtaattttgggcttattgaccaatgtctcccttttcctcttccacccctttcccccaacctctggtcacaataaggtcatatgtgacagacccactactaatattacgctgaatgtagaaaagctgaaagattttcctctaagatcaggaacaaaacaaggatactcactttctcctcttctattccacatagcactggaagcctggaagtcttagccagagtagttaggcaaaagaaagaaattaaaagtatccaagttggaaaggaagaattaaattgttcctgtttgcagaaaacatgatcctatatattaaaaaaaaaaaaaaaaccctaaagactgtactaaaaaactgttagaactaataagcaaatccactgaagtttcaggatacaaaatcaacatacaaagttcagtagcattttcatacactaatagcaaaagatctgaaaaagaaatttaaaaatcctatttacaacagctacaaaaaaataaaatacttagaaataaatgtaatcaaggaggtaaaagatctttacactgaaaactataaaacattgatgaaagaaattgaagaagatattaaataaatggaaagatattccgtgcttatggcctggaagagctaacatcgttaaaatggccatgctgaaaaccaaacatcgcatgttctcactcataagtgggagttgaacaacgagaacacatggacacggggagaagaatatcacacaccggggcctgtcggcagggtggcacgctaggggagggatagcattaggagaaatacctaatgtagatgacaggttgatgggtgtagcaaaccaccatggtacatgtatacctatgtaacaaacctgcacgttctgcacgtgtaccccagaacttaaagtatcacaataaaaaataaaaataaaattttattttaagtttgaataaggcagtaaatcaaataaatcacctttaagatataatttaaaaatatacctccaggaaaaaaaaatggccatgctacctgatatggtttggatttgtgtcccagcccaaatctcatgtcaaattggaagaggggtctggtgggaggtgattggatcatgggggtggatttcccccttgctgttctcatgataatgagttctcatgagatctgatggtttaaatgtgtgtggcactcctcccttctctctttctctctcttactccaccatggtaagatgtgcttgtctccccttcaccttcaccacagccatgcttcctgtgcagcctgtggaactgtgagtcaattaaacctcttttctaaataaattaataaattatacagtctcaggtagtttttgtttgtttgttttttgttttttgggtttttttttttctgagacaaagtctcactctggtgcccaggctggagtgcagtggtgcgatctcggctcactgcaacctctgcctcccaggttcaagtgattctcctgcctcagtctcctgagtagctgggattacaggcatgcaccaccacgcccagctaatttttgtattttcagtagagatggggtttctccatgttggtcaggctggtcttgaactcccgacctcaggtgatccacccacctcgacctcccaaagtgctgggattacaggcataagccaccacgcccagcccaggtagttctttatagaagtgtgagaatggactaatacactacccaaaatgatctacacatggaatgcaatccctagaaaaataccaatgacattcttcacagaagtagaaaaaacaatcctaaaatttgtgcagaaccacaaaagatcccagataggcaaatccatcttaagcaaaaagaagaaaactgaaggtatcatactaactgacttcaaaatatactacaaagctatagtaaccaaaacagtatagtactggcataaaaacagacacacagaccagtggaatataattgagagcccagaaataaatccatgtatctacagccaactgattttcaacaaaggtaacaagagcacataaaactgatatccacatgcagattaatgaaattagactcttatcttttactacatacaaaaatcaactcagagtgtattaaagatttaaatttaagacctgaaactatgaagcttctagaagagaacacaggggaaaatctccatgacataggtctgggcaagggctttttggataagacctcaaagcacaatcaacaaaagtaaaaacagacaagtgggattacgtgatactaaaaagcttctgcacagcaaaggaaacatcaatagagtgaagagacaactaacagaatggaagaaagtatttgtaaatcagacatctgataaagagctaatatccaaaacatataaggaactcaaactacacaataacaagaaaataaataatcctatttaaaaatgggcaaaaaacttgaatagacatttctccaaagaacacatacaaatggccaacagatacatgaaaaaatgcttgaagcaagcaaaaactctctaaacatcagaaaaatgcaaattaaaaccacaatgatacatcacttcacacctgttagcttggctatcagcaaaaacatggaagagaacaagtgttgctgagcatgtggggggaaagggaacccttctacactcttggtagtattgtaaagtagtaaagtagtagagccattttgaaaaaaatagtacggagtttcctcaaaaaaactaaatatagaattaccatgtgatccagcaatctcactactggttatatacccaaaggaattgaaatcagtatgctgtagagatgtctgtactcccatgctcactgcagcattattcacaatagctaagatttggaaacaaccttagtgttcatcaatgggtgaatggattttaaaatgtagtatatatatgaaatgcaatactattctcctatttcaaaaaaatagaaaatcctgtcatttgaggcaacacagatgaacctagaggataatatgttaaatgaaataggccaggcacagagggacaaatactatataatctcattcatctgtggaaactaaaaaagttgaactcataagagtagagagcacaatattattctttttaatgtccaattcagcaaatcctgggattcaaccaaagagatcatctatttcaacctgctgcctaattcagctgattcctactaatagcatcctagccaggtagtcactaagcctttgctaaacagtcatatgagtgaagaattcactccttcatggggcaagctgctgtcctctagacaactttaatcactggaatcaaaatcagcccctctgtcacttttaccctttggtcctaactctgacttagaacaggaaaaactaacctctctgccgcgtgacagctatgcaaatatttgaagtggcagccatgcaccacattattggcctcttctctaggctaaacatttgctctaactcttccacataaagcatgatttcctcttccctcacatcctaatgacccatgtaagctctaatttattgatatctatattaaaattaggtacctagagttagattcatctccagcccagaagacagggaatttgctacctttcttgtaagttgtatgccatatttcttgtaatgcagcctaaaaatgcattatctttttttcatgccgcataatactgttgagccatttgcatttatagtaaataaatgcttccttctttctcacatgcattcttgtcacaatccaggaacctcccttgatttctatttttcagcctaaataaaggactttatattggtccttgtaaaattacatgatgtttattgtaattctaacatgcatattccattttgaatcttgattttgtctttcaatatgttagctcgagaatattatattaagtgaaataagcacagaaagacaaatgccgcatgctcacttacatgtgaaatctaaaaaagtcaaactcatagaagcagaaactagaatgatggttaccaggggctggggagtgggagtgggggaagggagacactggtcaaaggatacaaaattttagttagacaggagaaataagctatagtgatccactatacaacatggtgactccagttaataacgtacatattgtatacttgaaaatcactaagagagtagattttttaatgttcttgacacaaaaaaaaaaatatgttaggtggtacatatgataattagctcaatttagccattctgcaatataaacaaatttcaaaacatcatgttgtaaaccataaacatataaaatttttgtcagtcaaaaatataaatgagaaaaaattcttttccttcctgaaatgtgtgtgtatatatatacacacatacatatattgtgtatatattacatatataacatatatatatatacaagatatataacatatatatacaagatatataacatatatatacacacacaaaatcaatttcctactatgggtctcacccagaaagtttacaaacacagtattaaagtatgagtgagatttgaagtagcacagaggagaggagaagacaaggaaaaatcttatcccattaaggatgaataaattcctataaaacataactccttcactgaccaccgtactcaccccaccccagctacccaccactgtaagccatcccaacatgcagaaatcaatattttaagtatatatatttttaagtgattgtttggtattccaaggtattactcacttttaaaattggtcatatgagggctcagttacaaggcaagtgactctggtttaatatgtgttcatttgatggacacccagttttttaaaaaacaccaggaatacaaatacaaaatatccaggatttctgctgtttgcttatattgtgtaacaaaactaatgttaaacatgacccttgaaactgtcctggcatccttcagtcagatactatgatgagtatgatgagcccatagtaaatttcactatagttccacttggaagaaaatactttttcctaagttcttagatgggaataacttaaaatctcttcagaagaaatacccactcaaaaatctatagtaaattttaagaagtcacgtaactctgaagcgattctggctcagtgatcacttcaaattgtgactgtttttttcctctctctctgttctgtttcttttgcctttcttggtctgaaaatacagagaggtaccaaaaactcagtacataatttgaaactaaaagcaacaaacccattcattgaagtataataggtcatttggaaataaaattcattttttaaaaagagaatccttttttggaatccatttttggaatatgaagtcaatcattatagctttattccatcagaaatagctttttaaggctataactcccaaactatttggattaagaattaaaatatctaaagagcccataggaaattaacccaatcatcataaaggtcccattttaataaaaggggatccatatcaaatcagactttacatgtggaagggaccttgaagagcatctacagaaggaaatgcaggctgtcggtcacacagctagacaataataggattgggaccagaatgcaggccctgcctcttgatccaggacttgttttcactgcacccttgaccttaagagggtgatggagtagacctaattcctcctaaaccagtcatttataacttcctctgaccaacatccaatcacgtcaaaagagaacaagaaaaaacaaacaaacaaacaaacaaaaaacaggtggaaacttagtccattactttgagatgggatctgactgttttttctctttatacagaaaatggagttatcatcatcacctcactaaaatgtaaggtccatgagaacagggaccacatctaacttattcatggttctcttgcgagcacttatgtggtgacatatttttgggtgctttttatttatttgtttttgtttttactgaccactattcaaacactctattttgaggtgactccctaaagtgtgcagtacaggtgaaatgcagtgctcctttctcagtccctggcggccaggactctagtatatgctctaggagaggtcacaccctaattggctcttgtagaagtgacacgaaaacataggacagtgtggacgttactcttggctgcggcagcagcagcagagacaagtgggtcagcagaggcttcctaaaccagtctattgcagggcatgatcttggctttgttcctattcctagtctcccttggaactaggaattggttcctgcttcactctcctgccttcctatcacttcttcctcatttattcttcctgaattatttggtttcttcctcagacgttctttcctacttttttgtctaaggcagcttctgttgcttgcaaccaaaaattctaataggcacatagtaggcactcaaataagtcttaaatgaaaataaaattaatgaattattatcataatttttgtagaacacttcacaatttccaagcactctctcgtatcctaattactgcacctggtcactgtctcatttgtcttccagttaagttataatatttaacaagggcaaatccttcttgatgcaagagtcaagttaaagaaaattttaaaaatctaaaccaggcttagacgtgattttttccaaagtatgctacgcaatctcatggtattaggtaccactatgaatggtatcatttaagtaaaaaggaagccctaaaaaatgaaatttagaataccaactggggagtaaaagctggaaagtatagggcatgaaataaagtttaaaactttttgaaggaggctgggtgtggtggctcatgcctgtaatcccagcactttgggaggctgaggtgggtggatcacctgaggtcaggagttggagaccagtctggccaacatggtgaaaccccatctctactaaaaatacaaaaattagccaggcatggtggcacgtgcctgtaatcccagctactcaggaggctaacgaacgggaggtggaggttgcagtgagcccagattgtaccactgcactccagtctgggcaacagagcgagacactgtctcaaaaaaaaaaaaaaaaaacttttttaaggaaatttgatatgcaaatagttgcacagaagagatgtagaagtgataactgaaacttcaaatatgagctggcattcgccagatgaaatagcatcaaagagctctagaaaagagcactgaaacttcagataggaagttcacccaccactctaccaggtgcagtggggtagaaacggttcagtgtagaggtctagaaatgagcactgaaacttcagataggagctggcattcaccaggtacagtggaggtagaagtggttcagacgctgaaggagcaacatctacaaaggcaaaaactatgtcccttcaaaacacaaagaatatttgctttaatcatatggctctaaccaagggggggagggttgtgaattcttaaaaatatcttcacccaccccatctcactttactagaaattgaagtcaaccataacccacaccgttctccaagaattaaatgggaaattttataattacaaatggtatttcaaaacttgatgtttcagaattcccttaataattccactaccttgttatcaaattatgttgataaggtaaagaatttgacacagggcatcctatttggtctctgtcaacacgaagcccccaaaccaggtttcctcagtctgatagttggaaaacagttacaaaatccattagtccatctcagtaagggagagaggaacagccattttgtgtgcagtgacctatcctcagccccatggactatgtagcaggagatgtagtggcgaggttccttttttactctctatatctgatctccaaggagtcagtgctcaactctttccaggataaagtctgaagaacacatttcaccaataaaaaaagatagtaaatacttgagtcgtttcagagagagaaaaatatgaaacactgaagatgaagcgcttaaatctttaatgtttttggacaacacagtctatatgttttctgcataatgtatcatttctttaaactatagtattaaaaataatttcaaattgtaatgaaaagtcatttggctttaaaaccacccaggaagaggatataaaatgcgtataccaaaagactatgatgcggcttccagtgtttttctgatatagatcataataatttaaaaaggcttttgtcaggctgtctgaatacatcaaatactttctcatttctgtgtcggctgtgaagctctaactatagtggcttctctagcaggtattctccgcacaactgtgccaaatcgttctgaggacacccagattctcctccttctcaaaacagacattcctgactgggtcctagggcagggagaggggcgttggacccctactgccctctgggttctccgagcaccaggacttgttgctccggcgggaactcgcgcggatccaccggctcggcacatcctgcctacaagtagggcggcgtgtgctaggagccgggccccgggccgagtcgtccgtgccgcagcggagagctccgaccggcgcggccccaccatccgctgaccttcgcccggtccggcctggagcccggccgcggcctccctaggcctctctaggccgggcgccggttcagcgaggaccggaagcgcccgccgtccgcccttccgcctccaggccgcgggcgccaggccgggggcgggctggggacgccctgggagtgccccgggggccgccttcttccccgcaagcccggagcgggcgtcgctcccgcccccgcctcgtcttcagttcccccgtcgcttccgccgccgtgggtagaacagacccgagctgggagccaggcctgcggcccctcgaacactagccacatctggcccgccgggcctagcacggagagaggccctggggcttggcggccggggccgggagaggtcgcgcggccaaggacacccgagggcctgggctgcctccccgcccttccccgcccctcccctcggccctggaatcaatagtggccgctgacttttcacgacaattgcagctgtctaattcatcagcgaataattaaatcagaggccgccgggcctgcctggagtcggagacgaggggtcgctcctctcaaatcctgtcaaattggggagccagtgggcagcgcggagagcggacaggcctcgccctgcgccgaggctgcgagagccgcctggacccggcgccattccgagtgtagggggaagcaagcccccaggtgtggggagcaaaaggaaggaggagggcacaggcgggggccccgccgaggctggactccctcgtcagcagggccctcctggccggtgcgtggtccgggtgcccggcgtggggcagcggccgtggggcccacagacaccatcctcacgcagacttcgcgaatgtcgtggaactccatcctcgggaggcgctttgcctttgaggaagatggagaggagtcgggagaagcgcctagaaaccgcattgatttagacatcaatcctggccggctccctccgcctgccgagctgcggggccgcgccgccccgtccccgagaagcggacctagggtacgccgggctccgccgagcgggcaaagggagcggcctgcgccgccaccccgcgcccgcggcctcgacgccgcagccgccacgccaacaccgattcctcgtggccaacaggtttctcgcagccctccgagtcggcagcgccgcccgcgtccctcttccagccgggccggcgggacgccctcagagcttgtgctctctcgaggccgccgagcccactgagcccggccggggcgctggttcgcgtgggccgcggggaacaggtcccgcttctccaacgaccacggccccggcggctgcgaaacggccacctccgacccttgagtccgccagagtcgctctccctttcacatttgcaagcaaaacaacatacgtaatagtgacatcgaggcacttttccaaactaaaatgatcctaaaataatctgaatgtactgttacttttgatcgtgttaccccaaaagattagctcagattcacttggttcttttatttctttgggagatgatactcgaggaatctgaaaaaatatacgatttttaaaaacgatatgattcgcatacctatttcaacccctcggttggttttgttagtttccaaatagaaatattgccttttgaaatcggagatcatatttctcaagtttaaaatctagccaagtctttttttttttaatactccgtctgaaatttttttccatggtagctagacaattgaaattatacacaaagattttttaactctcggattttcattggaaggggacgtaaatagtttttgtactaatgcctaaacaatattggatcttcaatcaaaaagtattttcagggcaaataaatgatagttttaagagggtaataaataaaagcaacacccgtgcttagtgtctcagggcaacttgaaaacagctccactttcagggagttaaatttgtcctttttacaatcaactgcaacttttgccttcctttggaaaggacgacaaaaagatttcacgcacaacttgaccggaacaaagggacatcatgccagtttttcttttgtggggtgacaactagaagagaggaaaagtttattttaaccatacttgagttgtacttttggaaccctcctttaaagagaaaatgtgacggcagatctttcaacttaaaaatcgaagctatggggctttggggcagaagggacagatagcgcgagcaaaactgaaagtcggtgaggggaaattttgtcttcgttctcagactaagttgcctatttaaaatgaaactttcttctagagcaaaatctccgttcccctaagagctgtgcttcccccaccccttccgcaaaaagaagcccttgggtatttgcaggttcgaatcctcaaccttccctcctttgaatttcattttcccaaaagagtagaattatttctcccaccagcttctgcagcgttagcatccgaaaaatcgggtgggtggggcgttgcagaaagggtctgcagttggccccgaattcggaggaaggaaagtccctggaagggaccgcagtcccagcccccagtcctggggaccggtccggatcagaggcccggccacccacttccacccaaactcctcacgggagggggctgtggaaaccctgagagggcagggagctggagaagcaaagaaatgtacgtgtgtgtgtgtgtgtgtgtgtgtgtgtcagggaagtaagcggttcccgaagacacaaaacttcaacagtcccctatctatatgggtagaggagggcgatcaaggtcggccgccctggtgttcttttaaactagacaggtggacgcgctagcagcttagctaggcagagctgggattccggtttcccctgcagactgacactccctggagcaggtgccaaagccctttggggtggggtctcctcccctttcccctctctcaagcctgcccactctcggcgtctggacttcggaggaaactatagtttgcttcccgcagccctactcccccaccttctaatccaggtgctgggcttggggctcggagagaaccttcccccagcacgcagggctcctgtcgcttctttttcctttccctaagaggccggacaagggtgagaacaagactaacaaccccatatctctccctgccctcacgcaaagtatcttttgtcaaccaaaaagttaagggcagtcccctgccagctctgctaacctggcgttttgaattttaacaagattaacgaagaagaaggagacaaaaaaggacgcgtttggcctcaccacccagaaaaacaaacaaacaaaaactttccaagatccaactggcaaatctgaaaagtgacggtgaattgtgacagtgaatttctgagctgagaggccaaagagaattagtggggcccggcttcggttttagttttattctccctgggctcagccagcccgagctttcaaacagaagaaacctgaagctaatgaagatctcaaacagagccacaattccgagggccccttttccgccacaagcacccactgtccatctgcacgtgtaatcacagagacttgccctgtcttcattaccaggggatccgaggaaaggggagaaaattctctgtcgtgaaaaggaaccttgtgttatcactactattatttgtgtatagcgacctaagagtttccttgtcctcttcaaattcccctacaatattgaaacagcatttgttgccccattcttacaaacgtttgaggcctttctggaaaaccattaccattcaaaggctagaaaattgctctccttccttttttttttttttttttttaaaaaaaaggcaggcgcagcagcagctataacagataacaaaaactttctaccgcataatcctcgccctcagaatgacaaagaaatgatattgacttacccccgaacggatgatgtgtttgataagggagggaaatttttttttttttttgaagatttctgttgaggagctgcacagacagctgcaattcatgggcgacgctgattgccagaaacgctatggattggcatggggtctgcagctcacagatccctgatcaatacccctacactaacacgccagatggtttggggaaggacaaaaataaaatagtccaaatcaacccaccattatgtttttttgtgtgtgtattgctctgataacctagttgtagcataaatgtgttctaccctgacacaaaacctgacaagatttcgagcattggggtagaaattagcagctctcctctaccctagatttgggtcgtggttactgttgtatagtaaaaacaaagatattgggccccttatgcagattgggtttacttgtggtctgtttatctttttccgtgaataatttataaagtatctcttttaattgaatgttcacctctctgtgtgtgtctctctatacctaaaaacaattttattgtggaaaacacatacgaaaaactccgatagtaaatagttattttcctgcaattgctaactcaagttcagaatgtttttcttttacagtgcaatagcctataatagtcttgttgtcgaagctgcattttattttcatgcttcttttgacccatttaagtttctgatcttcaagaaaattggacctgtgaatgtggcatgctaagtgaatatccaggtcctgatataatgcttggtacaactgtttgtccagattctaatagccgtgaattagcacttatcataccacatttctatacagtgtgtttgtaaatcaaatgctggtggggaggggggagaagaggagtgtaacttcaaattaaaagaaaaaattccaagttgcagaacttcttaaggttaaagtatggatgctaaacaaggggcagttagaaagccactttcccttatattttcttaaagaactatagagaaagaaacatcaaaaatatttcaaaaaatacttgaaaatcgtattagtattgatactccaaaaattgtcttgaagtaaaaaacaaatattgttcctttttagaaagaaagagaaaagggcatccaaacctaattcagtaaaaattagggtgctcactaaacaagcacatccattttccttttaaatggattttgggttgaaacataaaacctcaaaccaccattataaaaacaacgtgaaaaatctgctttaattctagtccaatgaaattatacacaaagaagccaatacgatttcatgatttccctgagatcgccaatattgatcgagggaaggcggagggatggtgggagtgagggaggagggagggaggaaggaaggaagcgaggcagcgagaaaatgcaactcacctttctgctcccaggcacaccgaaatataattcccaaaagcaggtttatctcagtgtcctggcaaatgagtttaacattttgaaaatttatttaaatggcaatttatatacctaggtttctgtatggaggaagcatcagcctagggtaactggccactccttgagactgaagccagcagagcagcagaggctaccttagcactggggcatatcagacccactacttcccagttctgcttctctcctgctgtatttcagtccctgtgcactcatggaccaagaacaggttgcactctcgtgaacttttgctcaactcagtattatatttcaaacattaactgactcaaatcatcccaagtgtccagatgccatatataaggtagggagtgcgaagagagacagtaggagggggtgaggaggagaggaaaaacagagaaaccaaaatctgagttattttacctggctcctgttgtgacactagagatgtgagcaaccagaaaagtatgtctggcaaaccagaggatctgccgctttcttactcaggctttgataacacagagaagacgctatttgaaagaataattggcagcgtattggccagagctcaatgaagttgatctatgaataacgtcactgtacattcatgtgacagggtgggggtgggggtgttgctctgaagcaagaagagagaggagggcggcagaaaaggtcactgagactaagaactgttttccaaatgaatcaaacctttctctggcaccaagaagggacatacagtattccgagctctgcccttgttttcttatcaagttttctctaacagctggaagtggttgaagggggctgtcttaaggagaccccctgctcttcttttgacagctgatcaaaagaaaataggtcacgcttctcaaacttatgtccaccctgtccttaattactgtctctttaaacaaaggcaacatctgcgcaacctcagctagcttgaatcttcggaggcaaacagagcgcaacctgctttggaagaatcttgttacgtttaaggctttatgccgggtgttggcctctctgtcttcaactacccctccaccccgactcggactgcagaaatctccaactctctgtcccccagttccactcccacctccagacctggggttgccaaacaacggaaattctaggaagacgtaggtgcggtttttaaagccttggcttgtgagcgttctcaggctggccggggcgctggtcttttcagaaacaaggtttgaatatgcaggtgtcagccaggattccttgtcgtctgcccaccgccgtttctctcccgggatttgagagaagcgggagtgtgtgtgtgtgtgtgtgtgtgtgtgtgtgcgcgtgtgtgtgtctcgtgttaggagaaaggtccgtggttgccgtctcagctggtttgcttactctctgcccccaggagaagtttgctcacttgggacaccagcgaccctcctcacctccacctcaccggttctacactctccccacttctttccaagtcgctgatgcagaaagcacttggtcaccttgaaacggcagctcccggaattctagttttgttttgcaatctagcagggctcttcggaagcctcataactgagatttatgggctcaccgggtaattaaatgatgttattgtgttaactttgcatgcattactgctgcccgcgccgcccgtgggccgccggccggccgcagctcgctggcgacgagggcactacagttgctctgaccgcgtagattatgcatgtcccggcctcgggaatttaccatgcattagaatacattagcgcctgcattttaaaaggctaaactattggctcccagctagggactctcggtaagtggcttgttagtgacgagtgtttgtctatactggcacatagcggagtcttttgctcccggcttactcgcctccaggaaagctttggggtgaggcgaaggcgattgaagcaatgccccttcccccagatcgcagctgctcaggggggacacagcacggcatctttcaccgaatctctctcgctcgctcgcactccagcctccctctccccagcgacccccccaccttctcctccctccctctccttgacgtttgattccagtagcaaaggaggtaaaaaaggcaccgagccgtcagccaaacctgaaaagtgcggccccgccccctccacagccactggtagcttcccgtggaaggcccgcctcccggggcagctgcggcctcggagtggttgcgcttggcgcccgtcgggcgtggccccgccccaggtccgggagggtaggttggctgccccggcgagcggcagagcccttctggacagctcccgctcacccaaacagaagacgtcggcgccggagcgggctcggacatggcgaggctgcgagccggcccgagcggcggggcccggtgatccctccctccctccccgtcccctcccctctcccgcacgcacgccccgtccgcccccaccccgcccccaccccgggcgagcccgcccgcagcccggggcgcacacccgcacgcgcactcctctccactcactcccgcgcccgcccccactcccgcagccgagccccgccacgcgcgccttgcccgcccgccggccgcccccgccgcccccgccgcccccgggccctgatggactgaatgaaggctgcctacaccgcctatcgatgcctcaccaaagacctagaaggctgcgccatgaacccggagctgacaatggaaagtctgggcactttgcacgggccggccggcggcggcagtggcgggggcggcggcgggggcggcgggggcggcggcgggggcccgggccatgagcaggagctgctggccagccccagcccccaccacgcgggccgcggcgccgctggctcgctgcggggccctccgccgcctccaaccgcgcaccaggagctgggcacggcggcagcggcggcagcggcggcgtcgcgctcggccatggtcaccagcatggcctcgatcctggacggcggcgactaccggcccgagctctccatcccgctgcaccacgccatgagcatgtcctgcgactcgtctccgcctggcatgggcatgagcaacacctacaccacgctgacaccgctccagccgctgccacccatctccaccgtgtctgacaagttccaccaccctcacccgcaccaccatccgcaccaccaccaccaccaccaccaccagcgcctgtccggcaacgtcagcggcagcttcaccctcatgcgcgacgagcgcgggctcccggccatgaacaacctctacagtccctacaaggagatgcccggcatgagccagagcctgtccccgctggccgccacgccgctgggcaacgggctaggcggcctccacaacgcgcagcagagtctgcccaactacggtccgccgggccacgacaaaatgctcagccccaacttcgacgcgcaccacactgccatgctgacccgcggtgagcaacacctgtcccgcggcctgggcaccccacctgcggccatgatgtcgcacctgaacggcctgcaccacccgggccacactcagtctcacgggccggtgctggcacccagtcgcgagcggccaccctcgtcctcatcgggctcgcaggtggccacgtcgggccagctggaagaaatcaacaccaaagaggtggcccagcgcatcacagcggagctgaagcgctacagtatcccccaggcgatctttgcgcagagggtgctgtgccggtctcaggggactctctccgacctgctccggaatccaaaaccgtggagtaaactcaaatctggcagggagaccttccgcaggatgtggaagtggcttcaggagcccgagttccagcgcatgtccgccttacgcctggcaggtaaggccggggctagccaggggccaggctgctgggaagagggctccgggtccggtgcttgtggcccaagtctgcgcgccgagtcacttctcttgattctttccttctctttcctatacacgtcctctttcttctcgtttttatttcttcttccattttctctttctcttccgctcttcccctactttcccttctcccttttctttttctttcttactctctccttgtccctgagctttcattgaccgacccccccccatttcattcgccctcccctcaatgtgccaacctttgccctatttccgatcttcccaggtactgggaggcgggatgggggtgtgcgttttcctctaggagccctgtctttccaagacccacagaaaccaggacctgcccttattcaaaaccccatgcacttcaagtctcttttagacaacacatttcaattttccgggctgactagtctccctgtgcagaggcagttgagaggctttgctctgcagagggaaaagagctctctactctcccacccaccatataggcaaacttatttggtcattggctgaaggcacagccttgcccccgcggggaaccggcggccaggatacaacagcgctcctggagcccatctctggccttggcgttggcgcagggactttctgaccgggcttgaggggctcgggccagctccaatgtcactacctacagcgagggcagggtgtaaggttgagaaggtcacattcaccgctttgggaggacgtgggagaagagactgaggtggaaagcgctttgccttgctcaccggccgtccttgccccggtcccagcgtttgctgggatttgccaggatttgccggggctccgggagaccctgagcactcgcaggaagaggtgctgagaaattaaaaattcaggttagttaatgcatccctgccgccggctgcaggctccgcctttgcattaagcgggcgctgattgtgcgcgcctggcgaccgcggggaggactggcggcccgcgggaggggacgggtagaggcgcgggttacattgttctggagccggctcggctctttgtgcctcctctagcggccaagctgcgaggtacagccctctattgttctaggagcacagaaacctcctgtgtgggcggcgggtgcgcgagctagagggaaagatgcagtagttactgcgactggcacgcagttgcgcgcttttgtgcgcacggaccccgcgcggtgtgcgtggcgactgcgctgcccctaggagcaagccacgggcccagaggggcaaaatgtccaggtcccccgctgggaaggacacactataccctatggcaagccagggtgggcgacttcccatggatcgggtggaggggggtatctttcaggatcggcgggcggtctaggggaacaattcgtggtggcgatgatttgcatagcgcgggtcttgggatgcgcgcggttccgagccagcctcgcacagctcgcttccggagctgcgagctcaggtttccacccccgatcccccgggctttcctcgcaccgctgagcccagcttgtggggtgcactcgaccaacgcccgacagggctggggaatgtgacaggcagcaggttcacccgggcttggggagggggagtttccgctttgacagcattttcctttgccgtctgctggtggattcctattcccagtcggtaatcgccccgcagtgttgatctaagaaggtaaagaaaactaggtttccctgcaaagagcctcccccaaatcggcggactccggatactttgagtggatttagaaatttatgtaatctttctcctttagtttatttttcatcctctcctacagttttctctgatttgctgttggttcggggcaagataaagcagccagtagagagcgataataatagcggcgggaaatgaactggagactggctgacagttcttaacattttgtcatagatccccccgaatgtcccaggctgtctctggtgggttttagtacccgccggcttcttgggcaccggggaccagaaggaacttggcagctggtcttaggggtacagttaaaggcaggatgacagctattctcctgctcatctcagagcgctgccgccccctcatgccggtcgcgcaaagaacacagcttttaaaaaacacgtgccttctgcccatataggtctgaaagtgatgaggaaagtaatgcttcgcctattagcgagtttcagcttttaaaatgatcccaagcgttgctgagatgagaaagcgtggcatcccgggggtcctcagccccacccgcgcccatggtgcaagtctgcagggacaggcccgggacagcactgcccacgctgctagattttccgcagaggatcgctgaagctgccttcgtgggagacagaatgcctcctccagcgagtggaaaaggcctgctgaggaccccgctttgctcgagcattcaaatgtgtgtctgttttattaccctgggttgaaaagggacaagagctttagcctttttatctggccattttatcagcaactacaagtgtgttgagtggttattattacataggaggcttttcagtttggggtcagtagatcagtctcttcagacactgatgcagaagctgggactggtaagtaggtattatgtgctcggagcgctaggggacaggagcaaatggagaagaaaagcggaggctttctccgcccggagtatcgatcggaatccccgccggtacgccgcagagggccctcgccgttgggccccgggggtttaacaagcccagccgctccgcaggcggctcggccggactctcagaccggtgcctggaagacaccgtccctgcccccctcccgccaaacctgcctcttctctttctctcataggttataggttccctttctctctcattttggccccgcccccgggtcctgccaaacagccaagcaggccggggtttagggggctcagaatgaagaggtctgatttggccagcgccggcaaagctcacccttaggcgaggtcacaacagaggcaggtccttcctgcccagcctgccggtgtagtcacagccaagggtggcacttgaaaggaaaagggagaaaacttcggagaaatttagattgccccaacgttagatttcagagaaattgactccaaatgcacggattcgttcggaaagggcggctaagtggcaggtggttgcaaccccgcccggtcgggccttcgcagaggttccccaagaccagcccttgcagggcggttttcagcaacctgacaagaggcggccaagacaaatttctgcgggttcgagcacacactctcgggcgttgggccccagagacctctaaaccaagcacaaacaagaagggagtgagagaacccaggctagaacttgcacgggcatcccactgaggaaaagcgaggcctcggtggcaggcatgttttcttccgacgcccgaaaatcgagccgagcgcccgactacatttactgcagaggtttccgcctccagtgagcccggatcccccagcggcctgcccggagctggtctccagtccccgccgtagtccgacgcacggccctctcctggcagcaagctcccagcggccagtctgaagccaattctgttcaggcggccgagggcccttagccaacccaccatgatgtcgcctgggccacctgatgcccgcagcggcgggacacggcccgggcagtgcgcagtggctcctgctaggggcaccgcgtgcgtgcttgtctcccgctgcgccggggacgtccttgggtgacacgggccgctgggcacctcccaagccgaggaaacggacccccttcgcagagtctcgcgcccaccccccaacctcccacctcgtttctcgctgctagggctcccgactcagcccacctctcctggcggtttagttagggatcagagctggagaggctgaacgcaacccgtgccagtacggaacagacgatatgtttgcctgctagctgcttggatgaataattgaaaagttcgctgcagtctgtgcttcgtcaagtcccgggtgccgggagaacaccttcccaacacgcatcagggtgggcgggagcgggcagaggaggcgggacccgagggaggagagtgaacccgagcaggagaagcagcccaggcagccaggcgccctcgatgcgagaggctgggcatttatttttattccaggctttccactgtgtggttatgtcactttctcaaacaaatgtgtatatggagggagatcgatgctgataatgtttagaagattaaaagagcattaatgctggcaacaataacgtaaacgtgtggacccagatttcattgatctggaacttgatccggcgcgtttccagtaagcccgacggcgcgctcttcccagcagagcgctcaccagcgccacggccccgcggttttccagcggtgccgcttcgccagctctgcgcgggttctcccgtctgaccgcagctcctcccccgcgaggccccagcccgccttacttccccgaggttttctcctcctctcgcggggctctctgccctctgcaccccctcccccgacctctgcaccacccgcccctgtgcgcacacaccgctacttgcgcttccggcgatccgcctgggcggctgggtccgcgaagccaatgcgctgaacggtgcccgagtcttcctaactatcctgtgcttggccgttgccactgggccctggtgactaagcccaagtttgaaaatgacgtggctaaagctgcctgctaacggcagagcttaatcagccgcagatcccctcctatcctcatcggttctcgtactaaaaaggctcacgcgcagactttttacgcaggtgcattcgttggacaattaaacgtggccctagtaacaaaagcctgagcttcatccctccgagtagcaggctctgcgctggactggtcgggtctaacagggagaatcttgtgtcctaccttggctgggacaggaagtaagagaagcaaactggggaacccctgccccaccccttcccaccccctggacgtcctgggccgaggcccgggtcactggcccatcgcgggtaaggaggtgtcctgtggaacacctgcattgactggaaaagaaagaactttaaagctcttccttcccgcttgtgggggacaccaccacaccctgccaaccactcccctggccaaatggtggcttgtttttccagaaggagcactaaggtgaattttatggaaaaaaaataaaagatcagggacctaagtgggagtaggatgagaactaattcttctgggttttttttttttttttttgaaattatgaatcccacctgttgaagaaggctgagcttttccaacagcgggtatcaatcgggagggaaagcagtgttttccagccctctccaagaacagtaattaataagaggaaggaaaagagagatgggaaagcaaatcgtgcattgttctgctttgagttgaggcagagggtaggctggtgtttcttcctcatcttcccactagtgttcttccttaaagaagggagctttggtacaccaccttggttcctagtcagaaagtgccctaccggacccttttaaactacaatgagatagctgggtaatcagatatgtaactaaggaggagagcaggtggtttccctttggtctggcggacaactggctccctccccacagcccccacttgaaagactcctaggccctgggaggggcgagtgggcctttagaggatagaatcatagactctctcctactcccatcttagaattccaagattgggcaggattcctggtgaatggtgaggtctgggcaaaggataaactgattaccccagattctctgtccctacaaggcaccagcagctgcttcactctccttttgagccaggtctgccctgaggtaacagtaccctaggccagttttaccatcccaagtgccagacttcagccctgagggaaggagagccagcctctcctgctgtcttcaaaccaaggcttcattttacagtcacccccgatatgagagagagcctccccaccaggttttctggcctttagacacttctcttcaaagaagagaccagaggaacaggactgaaaaactctcaggaagaaagtcctgggctccacactccatggctagtggctggatttggcagaaactgtcttcatgaaaagtggtatcatggagggggatccctggagcaaggaagacctcaagggagaagcagagagatttagtttctgggttcttgccaaaggaagggaaattaggagggaataaatagaaataattgcctgtataaagggccctggggaggagggtgaagacagaggcaccctaggccttaaacttcatctagactccctgggctgtgctgacttctgacccttttagggacctttgtttttgctgacttgggaaaagttgcttcctccagggagacaactcttcttagaggggagagtccataatgaggaagccctctggggtgatttatttatgctgtcaggtatagagctccgtcaggctaactcaccctgtggggccctatcaccccctcttatcacccaggctttttccctaaccaacctctgtgcctttgggggaaaggctttttgatttcccagtctcattcaaggcaatggctgaaaaatgtgcataggtttttctaggggcaggtggggaaaaggtagggacgtggattgtgtgacccagcccatctaatgcctgacatggtgcagatgggcaagacttggaggcaggctgtgggctgtgcagatagagatagcctcacttcgggagcaggattcctagaagctgtggacgtttattatgaaaaactgtcccacacaaattgtcccaaagggcagggaggctctgcattccacctcggcacctctttcaccatttgaggacccattactcttctgtagaaagcagactttgtttgggttggaagcacacctccaatgtaatttaatcagcattggactttggctcttgtaatcaaatatacatatactttctcctgcaagaagaaaaataatttctctgtaactggtattgacttgaagtcatgtaatctctggaaagcatcacatttttaaagggaaaggtaaaattaaggggaaaagaacccgcagtgttagtggtttgctttgtcatactaagaagagccagttaccacttaagaaagggcagaagaagcattcctagagcataaatacttgtgctgctccaattgtagatatttcatttacagttttctctgtgcaatcagccttggagatggttaaggataggaaactaggttgactggctcaccaaattctagaatgtgggctttattacttatgttgcattgacatccttgaaggaacctgtttgacggctcatttttctgccgtatttggagaggccacaggcagcagcagctccttgagttccagcaggatctgggtgggtagcaagcctttccttttaagggtgattggcagccattggcagcttgcttcccactccaccccagtgcccttgagcatgaagctgtgccctactgcgtcctcctggagcaagcttggagtccccaccccccagggtgaggttctgggctttgcccaagttgagtctgctagggaatctgttgtaaacacagatccattgatttgcatttgtcagagagtaaagttaaaccagtgaaaagagaagcccttatccttttatgcagggccagggaaacctttcatattgatcctattgatccaacctttccctttaaggaaaccacatagttaaagaccctcgttcaatagatttacccttcgtgcttgtgatattcctttaagtgttctcatctaggatagctgggcattaagcccacactccaaaccaaacaaaaatgggaaggggggtgggaagagagggggtcaggaggcagaattgtgggaagtgaaattaaatcaaactgaaatgtgtaatgacccagttggggatgtttttctcattcttctaaaatgacatgcagggataaagacaaaatagatgcatttggcatctttttttttatgagaaaagaaaatctgtttatatgcctagagtaaaaatgtctcaggaacatcattttctactgtaaaattatttcaattaagccaccagtttgcttcattaagattggttcacttaaaagcagtgatgttgccacaattattttggttcatttgtagcaaatcagaaaaaggattctccccagaaatgcaatattttggactctgtatatgagcataaacactgaagtcacttgaaaagagagaggatttggagtttttgtgttctgctggatgtgggaagcaacgggtagaacttttgttgtggagcagagtagacgcaataggaattgccagatattgctcagtatccctcttgcttgtagatatgaaaatgtaagtctcatttgcctccagaaccatcggcacaatccatttcatttcttccctgatccttttttcctgtctaaataacatccatttgtgatttttttcaacacggtacatgacctgtttctaattggctatctcttgggttgtttttgtacattcatgtttgttttatgtgattgaaaaatattaatgatttcgtaggtgagctaatgtatttatctgctgagcgagttcaaagggcagagttcagctatggttcaggttaattgaacaggaagcagtgagctctccaggctgtgttgaacaagggatcagtcccttaaaatatcacactcagcaaacacaatttcactgtcttcatcctagagtctgatgtaaaaggctcagatcaacttggatcacttgtttaaaaaaccaaagcaaagcacagtaactgcagcaataccctggagtccccctcggggaagaagagttttctcattggctaattgctttattggtagcactgacctgcagagcagctgcaggagcctggatgaaggcttaggcctcagaataatgtgctccattagaacagggcaaggcattttttgtttactcaattggagctccctgcaaagtgccattaaccccggcccaactgcttgtgtgctgcaaaagccaaaggtcacgccagtcagtctgtaggcatagcagctctgccctggtaggaaggttggggtcgcatcctgctggcactgccctcccaggggctcgggccagccctctgggccctttccagagttttgactaaagcaagcaattgcacaacttgtttacatttcccaactgctgaatcatgttttgatgattaaacagttttgatctgagcaccatcaatcacacacatacagaaaatccccccactgcccctctattttctatttatgttctcttcattactgtgcattacagtaaacagaattgtgcaaacggtgcttttagcaggaatatagttctgataagtgcttggatcaaggggaagacagacctccaaacatggctggggggctgtttggtggaagaaaggtttcaagtggagtcggggagcacagtcagggcttccaccgccagcaggtgaactagagtgccacctgccgggagtcttctaactgcactaagccctgcaccttccacaaggtccaagccccttccttcactttgttcctaatatccttgtccccattccccaccctgcagatcactacccatgcaagcattatcttcctagaagtagcttaaagggctttttcctggtcctttgaaactgtaacctctgcctcttctaattcattgccaaggagaaatcaacagttctgctgtcataggtgaggtgatttgcccatcctgcacattgaggtaatagtctcctgcttagttggactgtgcttgggggaagagaagcaaagaaagcaaaaaatagccgtgggagggaaaacgaatgattatgtgtggaagaaaaatggctccgttgattgtgccagtgagggctgtgccaactgtaaggtgttctgcaaagataaaatattgtacaaaggagagaggatgggagagaattagcatctacagggaggacatcgagaaagagatatgccaaatcagcaaactcgagtttaggctttgtgaaatcccctggaaagagaaaaagtgaaccagccgttttgcaattgcaaagaagtgagccagtgagctagacttcgagccagactgtggagctggctgtagctctgtgggtggcagctatttccacacttgcttcacatggacccctgcctggagcccctggtagcagagcgcctgtgggtgggttgctgcctccacgccccggcgcaggcttcagcaccacgaacagcgccatggaggaacgctgtttgagcgaattggagatggaccctctactgcggttaaatccaggcaagagcctgaccagtatctccagctctgtaggtctcagcgccccagtgcagggcctcatattttcctctggagccctgtggcttttcagctctctgtgtgagatcagcgataataaagggaagaggaggcggcatctgggtgagaagacaaaagatgctgaaagactttccctctgaagaggaagagcattaccaccgctggggggcgggggattgaactatttttctccatgttgctgccttctgcaggcatgattgccaccctcaacgggatgttttagatttaggatttcctttcaagtgttactgtctgcctgcccccacgccccaccccccaggtatacacaaacggatgcttttgtttccccagatgcatgctcctgatttttgaaagcatgacttttattatattaaacaatattctcacattatagcagcagtaatgtcacaaggagaaccaactgtggagcatcaccaccttcgataaatctagaaactggatttgatttcttgagagtctagtgatgaggctctttttaatgaaaaccttgccactgcttctgtccctgaccccctacgaagggccagagatgttgagtgacttcctccaggccacacagtggagtcatatggcactggccagggtgagaactgacagtaggcactgacccctgactctggcctttttcaatcagttgctttgctttatttctggttttattccagagaaaagagataggagagtccttttggtcaatgattgagcacaactcacatctctttgggtttcgagtaaaatggtccttgacttcccaaagctaattaaaatgtaaaactcttgctttatttcaaataactttagttcagacctaatttattgctaaggtggttctcagggaggtagagcattggaatagacaagtgtgtctcctttaaaagtcaagggtatgataaatgagaattttttttcccctgtgacaatttatcttcaagttccaggtggccctttgtgtaaaaggagggaaaatccatcccaaaacaaaacaaacctggtagagcattcaaatttgatgttgaaaaaaattgtttctgtgtgtctaaatgcccaaaattttgttctaaaaatgagcaggaacatatctgaatcagatataaaaatgggtgttaaatgtattttgtaagctttgactaaagaagtttcttccagctgtgtagtcttcgaatctgtggacgtgcctttctcaggagttgttgggttccactgtcaaaaccttttccagtaaaacatggatttggcaacagtaagtgtagcctttttggcctactttatatgcatcactgcatcttactaaaatgaggcattacactctacaaggacttgtactgaatgcatttcctttgtagtgaactcaatatgcttttgaaaagatattttacagaactgccacataaacaagaccttttctattatctgttttgaccctaaatactgaaaagtgtgtggagtaagataattttatgcttttctgaatcagtgccatagatccccaaacctaaaagatgtaggggaaaaattcgtcttggatgcaattgcctcctaatgtataccagagttcatttctgttcatgttcaagggacaagagtgaattctgtattcactttcaatgactaacccttctcatcctttccttcattcttctgaagaggaagaggtggacttcctgttgaagaccaaatcctctcctgccttctcaggaccccatgcttcctgtatatagatgtccctgcttttgtgaagttttctctgtcctcctaaattgggatctctttggaccatccctccctttgcatttagaacatagataggtatcgcctgctgacttgtcagtgtcagcccattagattaagatccagaagaggaggttagatacagcatacaggaggcagccaataaatatctgtgaataagttaataaatacttttcttttatatgacactgtttctacccattgtatttcccccatattattgtagatggcatctgagtaggaatcatcagccccagcacatcatttaggagaagcatttcacaatgtcaagttctcatcaatgtcattttcctcccaaattacgatattataactatgtattaattttaagggaatctcaaagtaggattgagtcttatccaaatcttcagattatcgccagtggagcaagagatgtgaaatgatcatcactagactctagactaaggacccattttgccaattggctctagttaccccaaagtaaccctccccagtcagtcagttctcctcgttttcctgctcaggcattgtcctcactgtcctgtccatgtctttgcacgttctgttccttctgcctggaattccttatctcatcagtccttctccaggtcctatcattcctagccacctccgatctgcctctgaaatcttcccagctaactttggcccattcctttctgtttctttctgaactcgatttgcaatcattgcaaatgacagaacagccttgttggctctggtcttacactgctctctaggtcttttctgtgtctccctttcttccccatggctctggaggggagatagcatatctttgagctccccatggactgctggtccatggctgaacccacaccaggtattcttttttgagtaagtcatttggtggcctcctgtctatctttacagaagcccctattctcaacgagagaataggttgggtatgtttacttacatctatcattcttttctagcttcttctctcaaaagggggtattcttttcttattttatttttttgatctggagccgtactttgtcacccaggctggagtgcagtggtgcgatctcggctaactgcaacatccgtctccagggttcaattgattatcctgcctctgcctcctgagtagctgggattacaggcacctgtcactatgcctggctaatttgtgtatttttagtagagatggggtttcaccatgctggccaggctggtctcaaactcctgaccttaagtgatccacctgccttggcttcctaaagtattgggattacaggcgtgagccactgcacccaacctgaaaaaggggtattgttttctataaatgctttggtcattgttggaaatattggctacataatttaaaatggatttctatgttaatctgaaatgagacataagcttaatatagagaaacagggcttgtgatgtcttcgttaatagcaaaggttgttctgcttcatacaagatggaaaattttacccacctcagggcaattgtgccagcaattatatcagcaaatcagagggactgctttcctattttaagtcattttaattatcagtaaactaaacttgcatctaaacagccattacttgagatactgcaagtgcttaggttgttaataacgtaaagttacctgtgaagaaaaaaaacagaggttaatatttttatctttttattttattttaattttatattttattattttcctttgatgaatccattgctgcctacactgtactgaactaagtagttgggagtgaaaatatatgaactagcccttgtccctttttgactttactgtatatttaagatttgaatggatacatcctcacttacctttacatatccatatggaattgagtgagaacagagtttattactatgtcaactttagttggaaactgaaactaagatcatttatttgctatacatcttacgtggaaattatatattagctcgtgatatttcatcttttttacagttatgttttgacgttcatattacatgagtaacaaattatgaagactaaccatttatgaacagaatttagtgttaaatgaaagcattccagatttttattttctgttgccttgaattgaatgcattgctgtgctgcatgataactaggtaagcaattgacctgtgtgactgtcatttctgtgccttgcataaccaaaccaagtttcctctgacactgaggcagagacaggcagggttgcgctgggcaggaagcagctctgaggcctccctgaagggccttagactcccaatgggggagtcagaggccaccctgttctctggctacggcaccatagcctagacatgggtgtcaccaaaggctatacacttctttacctccttttctgccctcttcctaaaggaagcatctggaaccagaaggagtccatatcgctagccccactcctccctaaccagttctccatcccgagccttagattcaggcttgcataggcagattctggaaagtccattaaaagggcaggatgtggagtaaataggtgattggattggagggtaaagggcggaaaattcacagcagagacaggtggacttttctaactggataagctacaccaactcatgaatccaagtattccacccctggaaagcaagaggtgaaagcaagttggttccattggtgaaagcaagtcacctgcctgagcccagagacagggtggaaaggctctacaaagttacatggcaggaagcatgggcacagaaaaggcaagcatgaggaatggggggggcggtgttggtgtttttctttgtttgtttgttttgttttgtttgcattctacctcatgccatgtattttagctcatttattcttggaagctgccactgctatggtgatacacagacatcaaggatgtccaatagtatagggctaattttggcaacacagaagataagtgtgggggtatttcacattcataagtaacaaacctatgcccacctggacaggaaccacgcctctttgtattgagactgtttgtgacatgcttgatcttctcgactagatcatagcaagcagggaccctgagctttgttctcctgcatcttccctttagccccaccacaatgcctaacacatagtttgcacttagtaaatatgcaaggataaatgatccccagaatcccactgctctagtgtcccaatgggagatcccctcaagacccaccaggtgattgcttgtagctcaacctgtattttattttattttattttattttattttagagacagagtctcactctgtaacacaggctggagtgcagtagtacaatcttggctcactgcaacctccacctactgggttcaagctactctcctgcctcagcctcccaagtaggtgggattacaggtgcccaccactatgcccagctaattttcatatttttagtagagatggggttttgccatgttggccaggctggtctcgaactcctgacctcaggtgatccactcaccttggcctcccaaagtgctgggattacaggcgtgcgccaccacgcctggcctcaacctgtattgtaaaatagggtttcactttaaacttttaaattttgttctactacaataattaccaaattccaggggagcaaaggtccaagcctgttgcctacagaattaaggcatccaattcagatctcaattattttgtgttaagaaaatctaaacaaagcaaacactgcttagggtttaccaatgaataaagaagcaagttggaagggatatcaaaaagatcaaaatgtttgcgcatttataactttaacaatgtctaagtttttttaaacttaggttctacatctggagcatacttttttaaaaatcataagcagtgttaaaaaatacttgacagttttgtcttgattcttaatgtgggtgttaagggatgccgtccattagtgagtacaccccagatcatgtgtttattgcatcctccttcttccctgcctgtcccctaatgatctggtgcacagagggctacttgagctgagttatatggatctcagttgctgtcatttgcacatacttaattcagagaggtgatcacattgatttccaagacccaatttttaagacactgtactcacgtagatatcttagctgctctgactatgttgtctgaaaaggaaaacattttaagcctttggaagcaattttgatggacatttcattgtgttctatattactcacataattaaatttccttcaagtcaaagtctgtttaaaattaaattgagaaatatttttgagttccatcaggcagataactttgtttagctagatttgttctgcattcacatgaaatggcgtcctacgaatcaatacccagtgctcacagttcccctgaatgtgaagaaatggcacccttagtagttcttgtgtttttatgcctatggttttgcaggctggtttattcagattctgagcattgtgaactaaattcataacttctttcatgcattagccggagtcataggactctgatttacagactcgcagtccagctcacagcggctagctttctttgggtcataccagagtttcatctgcatggccaaaggggtagaattccaacttgggtttgaaagcaaataggataaattgtcagaagatgtattcctgtgtacatctttggaaacaagacataggaacaaacccttatttttcaactccacccaccctgctactgaggacagaagaacaagccctcctcatcttttatcctgcctctccttgagacagccattccattaaattctatggcgagggaatctatggtgttcgagctgtaattgaagaattagcattccataaatgctgccttaatttttttaaaaaaattgttccaaagaactgctttttgttgcattgttaattagcctttgaacatttttgaattcattataaccttcaaggtctgccaaggtctttaaggtttcttctttatggctttgcctctaaataacaataggtacattgtaaggttattgtgagccttaagtaagttaatgcatacagatgcttagaataactggtaaatagtaaatacttgctaaaatatctgccattattgattgattgattaattttttgtaacttctccatatatcagcaggaaatttggcctgagtcaccaatgttcccatagcttttatatattaagaatattgcttggcattgtcaatgacagcatgagccaaacagatccagtttgtatctgagccaccatttactagctctgtgatgtcaggcaggggacgactcttgaagagcctcagttccctcctctgtaggaggaggacaaggtaggtcctgacgttatctagttggtgtacagattaaatgagacgccataagggtatatggcacctggtacattgcctcctatctcctcagttttacagctaacatcctattacacatgggccacatctgtacttcaacataaattttttgtcattttctcagatgagatttaggatgagtgagattgccagactctacactcatcactgggcatgctgtttgcaaactggccaaccatgcagccggactatttactccccacccccaatgtccttttaagactcccttaacagttatggacattttgctaagctcgtgcttagaacccagaagttgactgtgcacacagtaggttctgactgaatccctacaggcttagattggaatacagtccattttgcaagtgtggtatgtattgagcagacattctgtatttgatggaagttcacatataaaaatggcaactgagccaacaaaactcacatcatctgtctctataatgatcacaggtttggggggccttatcagaaagttatttttatagacaccccggtggtcatgagatttaaaatgctaaggagaatggcttcctctttaacctcttttctgtttttgatatgtctgggccctgcttctttatcttgttccccaaatccattcacttaggttctgacttggctccctggagagctcctgttttggttcacaccatcatctttattcccaaattaggatccttaacaagaaaagagaaaagaaagaaaacctgtagacatccagatgttgctttttctgaagtaacaactttatttgataatattttgaagccatgggccaccgaattctcaacatgcaagtttatttaaacagtctctagtatcctttcctgaccccaaattactttcaagcattaattgtcctagtggtttcatggccatattatttcatattcattagtgttttcatgaaaaattataacactaattagagtggcttccagttaattcacttggtgattcattactctctccttcttggtgatctgcatgtggtcatcctggagaaagcatccaagggtaattgcagctctattccctgagtgattgcctaatgccattagttctgatccacaggagcatctcgggaagctctgatggggtctggttacagctgcacccttgtcctgccctttggatgcagggagaaagggaagcctgcagtgaggactggtcctccggaggggtctagggaaacagaggggagggacgtcttagggaaaaggaagtaggggcaggggagggagttcagggatttgaacatcactttaacatcttctagaacttgggtaaggacagtatagagtaaaatctgccctgagaacttgcacgtagagtaaggaaggtggtttctcttcagtttcagcagacttgtggccaggcactgagctggagtttggaaacccggttccctctcagagctctgacatccagttcttccaactgaaagtttatttgacctcattcccattaggatggctgctgtaaagcaaaatgaaaacaaaaaataacaaatgttggcaaggatgtggaaaaattggaaccttgtgtgctgttggtgggactgtaagatggtgtagccactgtggaaatagtatggcagttcctcagaaatttaaaatgtgagttatcacatgacccagaaataccacttctgagtatacactccaaaagaactgaaagcagggtctgaaagagatatttgtacacccgtgttcactgcagtgttattcacaacagccaaaaggtggaagcaacccaacagttcatcaagaggtgaatggataaacaaaatatggagttttcatacagtggaatattatttagccttaaaaaggaaggaaaatctgacatatactatggtctgaatgagtcttgaggatattaagctaagctaagtgaaataagccaatcaccaaaagacaaatactatatgatttcacttatatgaagtgtctagaatagtcaaactcatagaaacggaaagtacaatggtgcttgccaggtgcctgagagagggaaatggaaacttgtttaatgagtatagagttttagttctgcaagatataaaagttctggagattgtacaagaatgtgaatatacttaacactatggagctataaccttaaaagtagttaagatggtaaattttgttgtgtatattttaccataatttcaaagaaagattgtttgttatttatattgtattgcttgctcaatttttaaaaaaaattaaaaatagaaaaacaaaaagccaggtgcggtggcatgtacctgcagtcccagctactggggaagctgaggtgggaggattgcttgagcctgagttctggactgtagtgccccaggcccatcaatgtcctcactaagttcaccatcaatacggtgacttcctgggagtggggtatcaccaggttggtgagggaaaaaacaactactgccatgttgctttcagttcttttggagtatatactcataagtggtatttctgggtcatgtgataattcacactttaaatttccgaggaactgccatactatttccatagtggctacatcatcttacagtcccaccaacagcacacaaggttccaatttttccacatccttgccaacatttgttattttttgttttcattttgttttgacagcagccatcctaatgggaatgaggtcaaataaactttcaactggaagaactggatgtcagagctctgagggggaaccaggtttccaaactccagctcagtgcctggccacaagtctgctgaaactgaagagaaaccaccttccctactctatgtgcaagttctcaaggcagattttactctatcctgcccttaccccaggttctagaagatgttaaagtgatgttcaaattcctgaactccctcccctgcccctacttccttttctctaagacgtccctcccctctgcttccctagacccctccggaggaccagtgctcactgcaggcttccctttctctctgcatccaaaggtcagttgtgtttgctcagtagtgggatactgcctgtgaatagccactgtactccagcagcttaaaactccatttcttaaaaacattttttatcaaaagttctgccactccactattcacaatagcaaagacttggaaccaacccaaatgtccatcagtgatagactggattaagaaaatgtgacacatatacaccatggaatactatgcagccataaaaaaggatgagttcatgtcctttgcagtgacatggatgaagctgaaaaccatcattctcagccaactatcgcaaggacagaaaagcaaacgctgcatgctctcactcgtaggtgggagttgaacaatgagaatacatggacacagggcggggaacatcacacactggggcctgttgtggggtagggggctgggggagggatagcattagaagaaatacctaatgtaaaagacgagttgatgggtgcagcaaaccaacatggcacatgtatacgtatgcaacaaacctgcacgttgtgcacatgtaccctagaatttaaagtataataataaaaaaaagttctgccactcaaagagaaccacattaatattttgcttttattaaaattatttttaattatttaagcaatgcattaaaacattctacttataaaaatcaaaacattaatgatcagaataaagtcctctttgcctatctcctttaataccagtcttcttcattacttcccagcagtaaccactcttctggctacaaagagtgggtctgccaatccaggcacttccagtgcatttatttacctacatatgtactcatataaattgtataaataggtagaaagacagatagatagatcgataggtatcttaggtttgcgtattgttttcacataagtggcatcacactgcatgcatcattccaaagctccttctttcctttgatagtatgcctacccagcttctacatataaatgaggttcttgcaacccacatttattgcatagtgtcctatggcatgactattttcatttatttagccatttctgttttgatgggcaattaggctgtttaccatttttggttgtttgcattatttgctaagcagtgatgagtgaacatccttgtacacacctccctgtgtacccatgggaatgtttcctagggtggacaccgagaagcaaaatgagaggtcatggagatgcacatactgtaattttgataggcactaccacactgtcttcgaaattggctccccatcagcagtggaggagagagctcctatttccctgacacttgccagaagttaatatattagccattttacttttttttgcatagttgctggatttaaaaataacattttgtggttgctttattttgttatatttttatgatttctaatgaaccttgatataatcatatacttgctggtcatatatatttccttttctgagaatgtcctgttcatatccttgtttggcattgttttttatatattctggatgcaaatttttgctttacaaattacaaatgtggtctcagttctccagttaaaaggcataaagtgattgaatggttaaagaaacaagacccatctatatgttgccttcaggaaacccacttcacccataaagacacacatcgactgaaagtgaaagagtagaaaaaatatttcatgcaattggaaaccaaagaagagtgggagtaactatacttatatcagataaaatagactacaaatcaaagactgtgaacaaagatgaggagggtcactacgtaatgagaaaagggtcaatacagcaaggggatataacaattataaatatctatgtgcccaacactagagctcccaggtatataaagcaaacattaatagatctaaagggagggatagactataatatattgaaaacattttatcccatggtattattttgaaacttaataaggcttcttttaactttgatgtatcaaattcatcttttttattatttattttttatgagacagagtttcactcttgtcgcccaggctgagtccaatggtggtgcaatcttggctcactgcaacctctgcctctgggttcaagcaattctcctgcctcagcctcctgagtagctgggattacaggtgctctccaccatgcctgcctaatttttgtatttttagtagagatggagtttctccatgttggtcaggctggtctcgaacttctgacctcagatgatccacccgcctcagcctcccaaagtgctgggattataggcgtgagccaccatgcccggcccaaataaatatttttgttgctcttcctttactttatgtgttttgcttcttgggtcatttttatttattttatttattttttagaggcaggatctcactctgttgcctaggctgagatgcagagccccaatcatagctcactgcaacctcgaactcttgggctcaagcgatcctcctacaaaagcttcccaagcagctaggactacaggtgcctgccacctcatccagctaattttattttatttttttcatacagatggagtcttgctatgttacccaggctagtctcaaactcctgagctcaagcaatccccccacctcagcctgtgtgctggggttataggcgtgagccaccatgcctggccttgggtcatttttaaacatttgaatctttattctttaatttttctgaagttgctttttataaattatgtgaaattggaatctatttttttaaaatctcaaatggatagccaactaatccaacagtttctgaacaattcatctcttctcactatttgaaatgcaatactttctttataatatattatattcccttatgtacttgggtcagtttctgcactccattctgttccatggatctattaaattctgtgtcaacgtcatactatttaaattatttttgctttatgatatatcttgagctctaataggatatatattttctctcctcatcttctgtttctacatcttcttagccttccttgtattttcacttttccataggaattatagaatcagcttgaatttatatattattttgatcttctcaattatacatagggcacagagttctattcattcaaatcttttttttttttttttttttgagatggggtctcactctgttgctcaggcctgagtgcagtggcacaatcacagctcactgcagccttgacctccctagctcgggtgatcctcctacctcagcctcctgaataactgggactacaggcacacccaccacacctggctaatttttttgtattttttgtagagacagggtgtcactctcttgcccaggctggtctcaaatgcctgagttcaagtgatcctcccacctcagcctccctggcattatggcgtgagccaccacgcctggaccccaaatctttatttatgtcctcagcaagtaaaaataagttttagttttggccttttgatcttttggttagagttatttctagctacttgttactgttgtgaaggtttttttctgttgcgttttggtttcatagttctttatactcaagtatcctaaccactatagtttagtgttgctgttttttttttaacttcatataaacagactcactatatgtgtattcctttgtgtctgatttcttttttccaacattatcttcatgctgttatgtgttgctgcatgtagtagcagtcattccttctttttcataactctataatattccactaaactcatatgccacagttaatcaattctcctgtcaatgagcatttggattgtttccagttttactacagagctgctctgaacattcttgtacatgtacatgcatcctaatgtacttaaccatacatttctgtggggttttcttaatttgagtttcttcagaagcaaaccctaaaacaagaattcaagtatgggtagtttatttgaaaggtgattccagaaaacactagtaaaagagtggagaagcaagacaggaaagggaagaagcccaataagagtcacttcatgaagcacattagtagagtgggcaaatggagcttaatcctgctgagtaactctgtgaaactccagagaaaatatgccttagagttgttccagctgaagaacaagggtgctggggtatttatctggcagctccaattattccctaattgaggaaatctcctggacccttccccagcccttctggcctgcactgcatgtgggcagggcaggctctggcagccagacaaagccctcaggcaaagagctgaaggtactggcagttagaagttgggctgtcgtgccccgcagtggtgaaggccaggagagtgtggcagcacatgacagagtctgctacaagagagtctttccatgagcagaatttctgggtcatagggcacatatatattcaaccattgcagatactgccaaacagtcttccaatctgttgtcccagtttgccctcccaccagcagcctaggagaactcccgcaaggctgtgtccttgccagctcttggtattgacttttacatttaagccattttgataggtgtttaatgttgtctaatttgcaattcctggattactgataattttgagcatcttttcatgtaatttttgaaaatttggatttcttctgtgaagtgcctgttcaagtctcttgcctgtttttctattggaatgtttggcatttccttattgatttccagaagattttatatattctggattcaggccctgtggcagacatatgtgtttaagatatctgtggctctcctttttactgtcattcctgtcttttgaaaaacagaagttcttaaatttttttaagagacagggtctcgctctgttacccaggctggagtatagtggtacgatcatagctcactgcagctttcacctcctgggctcaggcagtcctcctgcctcaaccttccaagtagctgggactactataggcatgcaccaccacgctggctaacttcttaaaattgttttttgtagagacagggtctcactttgttgcacaggagaagttcttaattttaacgggccccaatatataactatttctctttgggctagtactttttgagtactaagaaatctttcctgtgattatgaagaattaccctatgttattttctttctttttttttttttttttttttttttgagacagagttttgctcttgttgcccaggctggagtgcaatggcccaatctcggctcactggaacctctgcctcccaggttcaagcgattctcctgcctcagccttccgagtagctgggacaacaggcatctgccaccacgcctggctaatttttgtatttttagtagacacggagttttaccatgttggccaggctggtctcgaactcctgacctcaagtgatctgcccgcctcggcctcccaaagtactgggattacaggcataagccactgtgctcggcctaccctatgttattttctaaaaactttattgttttgccatccatactaaggtctgtaatccatgcagaacttattttttgtgtatgacatgaggtaggggtcaagaattacattgtgacacaatgcctatccagttattccaactccattacaggagagaacacatgttcctcatgttctgcatatccaaccttgtcattgaatccagtgtccatatgtgtatggatctatttctgggtttctgtccttttccactggtctggagttgtatgtccttgctgcagtattacaccatctattgtagcctcattaaagatcttggtagttgaaacagaaagttgtcctacgttgttcttcttcatctagaatagcttaactgttcttcgatttttttgcattcccagttaaatttcagagtcagcttgtcaaactcaaactttctttcctttcctcttgaaaggaaggaaagaaggaaggaagagagggagagaaatctgctgggattctgattagagattgcattgtacctgtagatcaatatggaaagaattaaaactcttcacaatattgagttttccaatcaatttatttaggtattctttaatttctctaacaaagttttgtagttttccctgtcaatgtcttgtatacctattgctagatctattctatgtacactcttgatgttttgatcctattgtaaatgatatcattttcatttactgtttgatgtgttatggagaaatacaattgattttgtctactgacttgagtcttagaatcttactaaattctcatactaattctaacagttcattgtgtattctcgtggatttttaagtacacacaatcaatattgattttctatgttcatcttgaaactggccaccttactgaacttttttattagttctagtaatttgcctttcaaaatcttgagttttctaggttacaaaaccaaaaaaaaaaaaaagtccctcatattaacttataattatgaggattctgtttctggctgaagacgctgttaagtaaaagaagtatggagtcacactacctgaatttgactcccagcctgttatttactatgtaactttaagtaatttgcttaatcctctgtaccttggtatcattaattataagctgcctcatagggtggttgtaataattaaatgagtttatacacgtagaattctgcctgtcaaataatgagcactcaacttatgtaagcttttgccatttcatcagtttcctaaattcctttataaattttctttctaaattttcacttcttatttattttttcttattttattgtattggctccttttccgatataacattgaatcatagtggtgcttacacccctcatctgaaatttcaacactttgaaacatttctttctagtattttttttgttttttgtttttttgtttttgtttttgtttttttatataggcatgttgttttgttttgcttttcatgtttgacgtatctgaaattgtctttgactggacttccaaatctggtggtaaactatgcaagacagagatacttttccaaaggaatgtcttttgttcaaactatattattcacataaagatgaaaagtaataacgaaacaatttgtttttaaacattgagatttggttgtgaatggagacaccgaccctttttccttcctgcagattcattagtgtagtcttaacaaagaggtgctcttcattcatgtaataaaactttttaggatgtttggaaggagctcagggatattcgtagccacatagggctgttggccaattcttttttaagacaatatcacattcttgagcttttaagtttgattaaattcttagtaagctagagtatgtcttcaagttattttcatagaaaatattttcatagaaaattttcatagaagttattttcatagaaagcctatagttagaatttttgagtcattaaataactaagaatgcctttctacgggaaagaccacctgaaccacataaaattctagcattaccgccacagtgtcagttttgctcttaatttcctccaatgccactactgtatttctcattttcctgcaaattttaaaaatcttactcctctttttttgcggggggcgggggttgtttgtttgttttgagacagggtttcattctgtcacccaggctggagtgcagtggcatgattgtggctcaccacagtctcaaccctctgggctcaattgttctccctgcttcagtctcctgagtagctgggaccacaggtgcacaccacccacgcctggctaatttttgtagtttttgtagagacagggtttcgccatgttgcccaggctggtcgcaaattcctgggcttaagcaatccgcccgccttggcctcccaaagtgctgggattacaggcatgagccacctcatccagcccatcttttgtcttactactttttcattacatatggttacttacaaattgctattttcttcttaataattttctgttcctgtttcataaaagccacctctttttgcatcatattgttatatcaaatgattctctaaaatgttctttaagtttctggaagatattatctggtaaattttctctggttttcagatgaggatccctttttgtcttctactattttttcaattgtctctttttcctgtttattcattctcaaatgagaagagacccattctggcttgccatggtcaatagaaagggtgtatgttttgctcatgacctcttttctggatgttagtgcactcattctctaagccctatactaaatcgccagttgatacacctaaccaagcttccatctaatcagcttccttgttgtgtggccctgctgaactgatgtgcactcatctcctgcatccgatcctgggatgctgagaagctgatcaaatggaatacacacgacaacccccggtatactgcacatcgagggctcctcttgtacctgtgctcaccctgagtgctctggaaactacttctccaagggagtgatgtaccagccttggtgtccctcctccaccctgcagttttgttttgttttgttttgtttttttgcctagttgttttctgagagttgcagttcttaattggcaggtggaagggagtggggagtactctggctctttcaaaaggcagcacctaccaagtagatggatggctgctgaatttaaatttctcaacagttggaggactcagatgttattttttcaatcctgatgtcccatttcaacccagttccattggccttggccttgtgtttaggtaaaaaatctccagatcccccaaaacagactgactgcagtcctggtttttggtgtgctaagttttgtgtttcattacaggacttcgagatgattttagcagaaagttgaagaagctgccccatgctctcctagccattttaagccagatgtttgtatctggaattaaatatttgttttagcaactcacgacttcctggatggcttacaggaatgcagcttggcagcagagctaaagatccctctttgccaggcttctgcataggcagaagagatgactgggaattgtgatttcaaaggctgagtgccccaaactatttattctaataggaaggtgggaaataaaagccccactggactagacaggagggaatatgggttctcagggctgtgtcactgcataggtgaccctagctgggagttctgatctcttatttctaaaaacaaggttagaccaagtgctctctaaaatcctgcctttctaggagtctgtggttttagcagctgacctagaccatctgctattagaagcctgttctttgaggctactcatgtttgttagagcctctgctggagagaagcagaagtaagaggtacatctccactcggtgtacaggctccagtgtgcttcctacaggcagcacctgcgggcagctacaggggcctgaaccttcccctgggagatctgcccaccaggggcactctgggcctttttcaggccatgcctccatataagaaagtcgtgagacatccaagagccctcatttcctgagtccccttcagtgactttgtattgaaagtaaaaatagagacaggaaataaaacttgtttttttcagagaatgtctttgaagcttgggaacacagaatggtcgctgtgcggtctgcctccagccgacagtaagtggacactggggagttgctctagcgcttgtcaagaccagcttcgacatccaagtgaaagcagaggcggcggtgtggagaaagagcagagatttgccattgatcatccacatttcctttggttttttttttgtttgtttgtttgtttgttttttttcctaagacagagccttgctctgtcacccaggcgggagcgcaatggcgtgatcttggctcactgcaatctctgcctcccgggttgaagtgattctcctgcctcggcctcccgagtatctgggattacaggcacacgccaccacacttggctaattttttttatttttagtagagacagggtttcaccatgttatccaggatagcctcgatctcctgacctcgtgatccacccgcctcagcctcccgaagtgctgggattacaggcatgagccacctcacctggcctatcatccacattttctagatgagaggaagaatgtactacaggaaatctccccaggatctgagatttgtcctgtgtcagaggtgaagcccaagacacggctcacaccgacattccagggcagtgccaagccttcccggactccgggcagctcggaacttggggactttgcccccaccctccagcatctccagaatgaggggagtgtgtatgtgtgcatcgtgcatggcccctcctgccttcttgttccttctccctcctgtctcctttttcctcttgctccgccattctcccgcccacaatatctgctctaataagccaggcggcagtgctccaactagcccataggtggttcacgctggagtaccttgtgcaggataatttgccaaatgggttagaggtctgtcttgcaaggcctgtgcatacatccacaattagaagggagtgaaaggaggaggggaacctaacaaccaagaatggctccacatccatttgcacagtgtccaccctgtctctgcccttggcctcccaaatggatgttggtctggacgtcactggctccgctgcctgtctgtattggcatctggtacatgaagaccaagtttctgaggaaagccagctctcaaccttgaaacaaagccattaagtttctcatctgactcagatcaggcacgtttggagaaatgagggccaagttagagtttagttctagaggtggttgggggcggagggcaggttcatggtactggctccatggtcatctgaacctaagtggcctttggtgatgcgtcagaaatcacaatgaagcaaggaaacctgcaaggcatctaactgggaactatttatagtttccaaaatttagggagcacaaaataatccaataatgattttaagacagaccctccccatccatcaaggcctggctcctcccaggtgggtgatcagtgcttctggcaccagctggccctgaatggccagtggagctgcttagagcctgagccccaagtcttgtgtgttaggccccctgctcccagggtctctgtggcaatgtgctggcacctaattatttgctgaccctgagaagcatgcattgctgagatttaccagcatttatggcttactgaatatcaaatatttattagcagagtgtacagttattctattttctttcttccttgtttgaattcaaggaatcttattatttttactttaaaggctcttgatcatgcagattagttccaaaggaagggttctctactggacaccatcacctctcccatagtcttgtcattctatcagtactgaagggccaccagttcagagcagggaagtgaaggggggttatttccattcttcttacctcaaacacctgtaggtttctcagggaacaagcccagaggtacaaatgtgaacctacttttgtaattgatttttccaacataaccccaattgactgccttagttaatctttccaacagaactgcaggccctatgtcctcccgggagagtgccctccttagtggaaagggtcacgctccccactttgcacaagccttcctaggagggaagctgcgagctcttcagctgaaaagcgaaaaggcctcttctgcaggtgtacttttcaaacctgtatccttggaggttaagtgtctgctgacaaatgcacaccctggatggtctctctccccactccccacccttgccctgacaagatcacattgaactattcagggaaagtatttactgaatgcaaggagaatagagcacttctgcattatttattaggggctaacaatacccatcatatgtagatgatattgatacccatcaatgtatttggacataaattagtatgttaggaaactccagtggtccaaaaccttttaggatctctgacacgtatgtaaaaacacgtcgtagtcttacctcttatatgaggctgggaattggctatgagacaacctcacaaagaaaacaaacatctttaaccttttatttgccattagccctctgggcagttcatctactatcgagtaagacttgaaatcatgaactcttaacctctccttacacaccttctttctgctttctctaaggaaggaagaatgttcacatttcctgagtgtctactctgtgccaagtgttacagcaagccttttgatgtcctggagtgctggacattagcatccccactctataggatcaggaaactaaggctcacagtcctgcagctgataagtggctgacaaggagtaggaaacagggtcttggcttccatctgagcttcttacagtacatttgactcacccctgggcaggaaggcaaaggtcattcttggcttctgtatcagttacctgtcaccacaataatgctgcaaaacacagaaccacagcatgggtgatataaaacaataaacatctatttttgcccagaagcttgtttgttggctgggtgtgtctgctgatacaggccgtgcttggctgatctcagctggactcaagtgtgcatctttagtcagctgctggatcagctggggctgtcccgtccaagatggccttggccaggacagcccatccaagttgagtggggagttccagttctggggcagcgaggactggaagattctgacccggtgttgagttgctcttacttcacaggcttcccagaaactgtggaggctgggaaggggttttccaagatcaaatccaggatccagtgctaattgagtcaccctaaacaaacgtgtttccttctccaagagtaaaatgggaatccatacctctgccccatcttcctttcagagatgttgtgaaaagaaattcccaatgggggatccagactttggcttccactgggactcacctcactgtgccttcagttccttatgtgaaactgacaaccctggactggacaaaacactgaggttctatggctctgtgaggaggaccaagctaagggagataaaagatgttcaggtgccttgaagagctaacaccactgcacctgcggaactgggtgtcaaggtgacatgcggttccagggtaattccccaacctgtatctgcctccctgaaccaaccagatactgtcccccttaccttaccctccacaccacacacacacaaccacacacacacacacacaaccgaggtcagtctaccctctgttcgggaatgggccctcccccatctctctccttgcttcccctccccaccagcacaaaggccctggcttccaacaccccattactgctcagcatccaaatatccaaagacttttgttactagaaggaaaacgcacgatgcgtgacaagcagcctttctggccggggaagctactctgttactgaccacgcagtcggtggcaaggtccctccccaagctgagagagaagggagagcacaggacaccacggggccttttctgtcctccatgatgttctccagtctcacacaatccctcaccctgtcccgcctccctttgcatcccctctggatgggaatcatccctggcttgatgagcgttgctgcacgactctgaccacatacctttgtgctgcccatgggtaggcgatggacagggccagggccggttagtctgggtgtcagagggcagctgagctcctagaacgcccaggagcagccactctggaggcaaagtagacctggcccacatggagttgggttgggatggggaaggcatggagaaagggtcagttgtggagagacattctctctctccaggttagaggtggggaagatcagctatggggagcagcacattcttggaaaggcactttgtttgtcctgtgtctgacctcctgaggggcaaaaatccagtggccaccagggagaagcaagttggtgtctgaagatctcagagagggcttgtgcccgaggccagggcttcccttgttttaccctgggaacccagtgttttgaaaaatttatctaccaaggaacctatatttttaggcagtagctgtctgccatccttgttaatcacagattatacacagatgtgtacatgcctgccagtaccaggtcctgggccacaggacacaaccagcatgaccaatctgagtcaatattatttctttcaaaaagtggggaaaggtagccttattgtaggtaaacaaatgacttctcttcgagtctttgaaatggaagcgagcgcttggccttccatgtggtcctacataggacctgcttccctgtgagagggagggagctcaagaatgtctgagggcttttgggatctacacccacctccccatcaggcagtgacacatcagctcctggcatgccctccctgctttcctcctaaaagagagaggagaagaatcagatccaaatggtctagacagggctgggctaaccttgcaccttccgtggcagaactggctttgagcagttggagttcaggagaccctgaccagcatgtgactgtgtcaagactgaatccatcaatgccactggaacacctgctgtttcgttgggtttctatcgcatccttgggttggagggagctattgacactttcctggctgttcaaaaatgggcacatgtggactatagagtgtagtaattgaacagcaccaaagccgtttgcactctgcttgtgcctgcaggcacacctggctccacagcccgggtctgaggatgctgaggtcacagcctcacaccagctcccagacgtcattggatctgtctcctttttcttaggctttcaaggcaggtgttctccctcctgtttttattttcctttagctcctgaccaactgcttttgtcaaaatcaacagctggcaattgctagctataaaaaccctgggcaacatatggacatactgcctcattatttagggcatttgggcttgctgtacacttctagactgcaagctacagctttgcatttgttgctgtggcatctggtggcttccaaaggctgttgggaaggcataggcaggatgtattgatctgttctctctgtgcagtttgcttcacgttaagtctttaatatttttatcttaaatatgtgtgtgtatatatatatataattttaaatatatgtatctcacacaaaatataatccgacaagccaatgtggacctgtacccaaactgtctaatcaccctattaaaagcacaaatacagcattatctgaagaataatcaatattggtatgaaaattgagagctatgtggttaatccaaaggagcgtgaattgacagaggacctcagccaatgtttgcagaagatatttgcctggattttgttatcaggagattatcatgcatcactatttattcagaatcctccagatgaaggcttgacaccagttgtcccaggggtagggtcagggacggttgtccagggacctgaagtggcagtaggggcaagcatagtggtttctacatcttaaaaggggctgcagaggtttatagaagcacagattccagaaccttgccccacatggtgaaaatcagaatttctgggggtggagacccagaggctgccctgcaaagagggcccctctgatgtgcagttgggtatgggtgccattccctacaagagaagtgtttattctttctttccctgggtctgcagcaaacctgggatgcggtgtcagtgtcatcacatatactccaaggtctccatgtatttccttttaaaatgaaaatcatttttcctgatttgcctagctcagagttactggggtaatacaatgagaaggagagtatgaagtgaagaggtacctgttatctcacttaagcctctctagaattgaacatttttatttccttatttagatgaggaagacaggcacaaagaggctacgtaatttgcaaggccccaggtcttggaggtgtggaagcccaggtttgaatccagagctttccattgcataacatgctcctctgagactgtagaaatcaggcagacccttgcaactcaaaccgaggcatgtggaccagcagcatcagcatcacctgggtgctcatgagaaatgcagaatcccaggccctgtccaggctgaactgcatgagaatctgcgttttgatgagccctccaggtgattcctatgcaccttaaagtttagcagcactgctgtagaggacttcagattgagcaagagagagtagacctcaaaacaaggttcccctgcaaaggctatttctgtgtgttaccaccacacaggaatcatcagaatccaacaaaaatatgcagtcttcacaggaatgagcaaagaagaaatcattaccggtaagctgttggaaggatggcagtgagcagtcttagccctttctgtctgagttcccactgcaggggaagcgctcctcatccaagaaagccaaaaggccccaaaagaatgagttttaagatgaaaacaaattgtttttatgtggatgtgttgtgtgtgtttaattttgaagacaatatgaatacttttagaaatgagagaaggaaaaatcaggaagaaagtttagccaagctgatacagcctagcagctttcccattcaggggctctcctcttcctgccctttgagagtatcagtgcattttgattatttcaggaatgattcatttatattactttatagcacacagcatccagcagggagggcagccagttaggtagaaggaaattcagcttccaagtatctttcccgtaagtgtttgtcttcaggttaaatcctgtcttagtctgttaaggctccagtaacaaccacaacaacaaaataccgtgacttagtgcttataaacaatagaagtttatttctgacagttctggaggctgggaagtctaagattaaggtgccagcggattcagcgtcaggcgatagtctgtgtcctggttcacagagaagactttctcactgtgtcctcccgtggtagaaggggcaagaggtctctctcaggcttattttataagggcactaaccctattcctgagggctccaactttatggcccaatcacctcccaaaggccccacctcttagtaccatcaccttggatgttaggattgtaacatatgaatttttggggggacataaacattcagacaccgtagcagaccgtccacataagatgctgcctgcagaacacattgaacaggaaatgcagtgcccgaaggccaggaaacaaaatatacaagccagtgctttgagaaacataggaaagcatctgagcagcaccctgggtgccagtcttgggggaatgtcagtccactgcaaagggattctcaacctctggccagaatatccagtaggatggattctgagggcgactgccccatctgggcctctgctccttcctggcctttccccagtttttcctgttgaggccacactgtcaccacacccctaggggagctgggacttatttcaagtgattttttttttttttttttgagatggactctcaccctgtcacccaggctggagtgcaatggcatgatctcgactcactgcaacttccacctcctgggttcaagcgattctcctgcctcagcatcccgagtagctgggattacaggtgcccaccaccatgcccagctatttttttgtatctttagtaaagacagggtttcaccatgttggccaggctggtctcaaactcctgacctcatgatacacctgccttggcctcccaaagtgctgggattacaggtgtgagccactgcacctggccatttcaagtgattataacacacgttctcatgttttagcattatgatttgtaatactgtatttaacctttacaggtcacttttctgagacaccgaacctgtctgtgaagtgtacagattccctgaaagcgtcaagaagccatttgtcctcattgtcccaaacattcattgtatccatggctccaaaaagaatcagtcaggaatactacagaggcctggttgctgccttctaggaacttgtaggctaagggagaggtcgtgacacataatggccttgactgcatatgtcagcccaggcatggatactcacttctgctaaatcaaagagactctgcatatactaacatgtctacaagcctgaagtcctattgtaacattgggcttcttcccccaccctcatcccctgtcttgtactagcttccaatttcaaactagccaaatgagaattggctaaaccaatttttctagtctttctctcccttggtcttctgtttgttttgttctaatttttcaaaagtctggacgaaaggaatttgggttgggatgataccatcattctgtcacttctaaattcattctgttaacaatttttagagtcacatgggtagaagctttgattctgaaaaactatgcacttttaagttttgactccagaaggtaatttcaactcagctgtaaacaattcgagagggtgaatatgaaagaggaactgcctcaccaggcttcccccaccctggcgtctggagtcctccctgccttcgtggcacctgatttcagagataaagaatttcaaggatatgctagagcagggaggatgtaaaagggaaagacaactgcagttagctcaaaaccagactgtgtgaaacagccctgctgctttgtcctttctcccatcccccactcactcactgatgccttccatcacccggagattacagggaaggctggttattgacagctgggcagtttgcacaataaagtttaacggtttacatctctttgtacaactttgtcaatgttttccatggatcaccttctcaggtgagcccactgactcctctccttcttctctttcccttcaagcgtgcaaacgcaaagagcaagaaccaaacaaagacaggaacaattcccagaagaagtcccgcctggtgttcactgacctccaacgccgaacactcttcgccatcttcaaggagaacaaacgcccgtcaaaggagatgcagatcaccatttcccagcagctgggcctggagctcacaaccgtcagcaacttcttcatgaacgcccggcgccgcagcctggagaagtggcaagacgatctgagcacagggggctcctcgtccacctccagcacgtgtaccaaagcatgatggaaggactctcacttgggcacaagtcacctccaaatgaggacaacagataccaaaagaaaacaaaggaaaaagacaccggattcctagctggggcccttcactggtgatttgaaagcacaattctcttgcaaagaaacttatattctagctgtaatcataggccaggtgttcttcttttgtttttaatggctatggagtccaagtgcaagctgaaaaattaatctcttagaaccagacactgttctctgagcatgctaagcatcccagaaacccaaatggggccttcctggagcgagttaattccagtatggtgtcaaccaagctcgggattgcttaaaatatcatccatcccacttcaggtcctgtcagcttcttgcagtcagagttcctatgagtaacaataggagtttggcctatgtaaggactctgagtttaggcttccaagatacaacaataagagaagaatctagcaacgagaatgacctcatttgctttccacatgcttagcctcattataccatgttatgtccaagttcacagccacaacatcagaatggtaattactgagcacaagttttaaatatggacgttaaaaaaaaaaatccaaggacctgtttttccaacccagacatcttttcattgaatgatttagaaagctttaagttgatccagcttacaattttttttttctttacctcctggaaatctcatatggtcttggatccgtcaaaaaaaccagtcagttcacttgcgctcaaagtatcaagcacaacaaagataaacagaagtgaggaaggttctgggttcactacatctggattttcaagacacctattgtgaagtcattagggaattgatgagaatatggcttcaagcacattttgcagtttgctacaaattctgttgtacataatgcagacgcacactcaggaggccaatttaactgttaacagtgcatggagcgaatgcagcattttaaaagatctaggtttttttaggtcattaatgtgtccttggttgatcagtcatctggtccctcctactgtgtgttatgaccaccacgtaatccattctcgctctttctgatttggggtttttcctcatccatcccattagtagggatgttttctgtgttttctagcaagaaaaaaaaatcaatcaatcaaacctgcatacatgttactcatgactgtcatctagtcctaaatctcttctgttgttgaatcatccttgcaaaacagctgaatacatctggagaaaacacagcacaccaaagaagcagaatactgcaaaccaaagacatttatgacttgtcattttctagcctaaaaatactgtgattacttttagaaatcagaaaacctctgcaactccgaatggcattcagctcttgcatttggcgcatcatcgggctgagcggaccagctacaccaaggacattagccaagccacccagaggggtggctttgccacaccagttgtcaccttcccatagcaagtggaagagcgcccacagaactctgggagattgcaaaggtcacaatgtgcatatttaccagtgaatggccccgggtggggccacgtgggggtgttcaaagcaagccaaacgctgcaatcattctttacagacacttgagactgacttttttatgaattacttagtcgaaaccaaagaaactttttctgcacctacttctgcaacaaacaaaactgtcccattaaaatgaataaataaatccgtaaatcaatggaaatcaccaccaataagaaggaagcacgccagaaaataaacgaaaacaaaaacagggagacacactgtgttcaaacagacctcttgggacattttttggaagcagattttaaagaaagggttgagacaaagatagaaataaggaagagcctcagtggctgctgcttcatttgacaactcacacggtaatcttaaagctgaagattgtctttaatttgtgcctatgcagtttttcaaaagaacacggaacagagcaacagaaacctcaacagctacaataccaaagatgaggatttctcacaccttttgtttcagttcattatctcctcttgcctggctaaaatactaatagcgccattgaactgtataaaggtaatcaattatgtttctctgagcaacaaaaggaaagggccatttatttgattttattgtttcatttcaattttgtcttatggttttttgccccaacatggaatctctcaaaagtttccatggactccaagtttaagatgttgggatattgaacagttctctctgctcagcagagggtagggaataacattatcacttgaatgttctttgcttaacccttagacttggttccttctatgttcagagtctcatcatcaggggaaggaaagggagtgagggtcagggataggggtcttggtgatgcatcctctcccgagccacagaaccaaagagtttatagaggaatttacagcctcgttttcatgtgattgctacatcctaacagggcttcatttgggggtggggggaaacatgtaaaaataattgccagtttctacttttctattagctttttaaaaatcagctgtaaagttgcatttctaaagaaagatatatataatatataaaatacatatatagatcaacttgacattggtgataaccaaaattattgctgtccaaattcatgtcttgttttggtccagtgcttcatttgctaagtattcggttcagaatttttctcatttctcatgccattccagagttaatttgccactgtggatgatttgaagtattcagatctctatggaagtttctgggacaggtttaaagtcaagatcaagcattttagcatttaacctgttgataaatggatccatggtgtacatgagttttatttgtattcggagtcatctctattctatccctcagcctcgattaaggtggtgagtgaagtgcatccaacagactcggcccagaactgggtcctgacagtggggtgctcatcttctgtaactgttgggaaggctcggtggtccattttcaccagttaaagaatatgaggccagcccagaaatctgttctccaggagctgccctgtcccatctgggtgtgccagaccccctcagtgagcaggtccaccaaagggacttctcacaggggaagcccaactcctgttgcaatgggttgatagatttcctcagggtggtaattaccaattcgtattttgacaagcctatgtgcaaccacagctggcactggggtgggcagtggtgttgggtgggatgggggagagtgtctcaatcctgaagagaaaatataaagcaggttttggggagacttctggagtcctgcccctagagagccccattgttgttctttgtgccccctcctcattccccctatgtgggtctccctatgcaggagctgtgagagaatgtgactctccacaatttttataattcatccttcctaggagattgttcattggctcttcccttgtgtccctttgtcccttgctcatactccatgtttcctttgtcaaaggactaagaaaagagcatatttcagcagaggagtgttcccatgtgggttgatttcaacttgggtatttctaaaagagtccttgtgacatgtgtccagtggaaatggttgctcttttccagactggattgaggaatggagcctgtttgatttggttagtgattctttgacatactaatctcagcgtttgggtctccagcatcctctgaagatgtctagactagtagaggctgcctttgtgacctgacattacaacattggtcaaaccagtcctctgataatcagaagaacatgtcataattgtttaaaaaaaaaaaaaaggcaagaatttctctccaaggagctttaataaatgtctcattccagataatgtcataccagagaaaagtgcttgcttttagaaaattatttacatacatatataaatatatatgtgtatctatacagttatgtatcaaaattttaagccctgcagaatttcaatttgttagaaatctaacagaaaaaaatttctatattgaaaggtaatagaatttaacccagtgagtttactcaaggatttttaaatttaagttaataatttcagagaaaataaccatttgggtgtggttatagtttagtatccattacctcaatccaaggaaaattccaggcattcctcaaccatcaggaaaaggtacagtgtgaaggaacagttctcagccaaatttcacattcttgaggcaacagaaatcaaaacactcagagccattgagtggaaaaacaatttactttattcctttacacaaataggcttgcattgtttttgttttaatgtgattttggtactagggatataattatttcattccaggaaataataaaaaaaaacagacagagccaatacatttctttttttaaaggaaacagcaacaacaataaaaactcagcaccaatatttaaaagcttttccaaaatgtaaaagaagtgtttagcttgcaccatgcataaaggtgcaggctagttgaaccaggaagcatggcacttcctctggagaaatccagaaagagttgcttctaagctcccttttccccctgcaggctcttggcaattgtaggctttagcaaatccagaataattttcaattcaagctaaaataaaatcaacatttggaatgtaaatctgatacacacacacttttctaagtcaaacaacatatttcaaaaccaaaaataaataccttttagataatcagttattttctttgtctatactgggcacccacctactagtgccagtaaattcaagttgaacagatttttaaaatcactattatctgggtatgggggaaacttccccacttttgaaaatgttggtagaattataggaatgtctgtttgattatcattaccaaagtgtcatgacagtatgcctttgtagtgaactcggattttcaggagtttgaatagttggatattttaaaatctaagaagaaaaggcctgtttccaatgttgttgaagaataatgaactctattaaaaagtggagaaaaagataatacatgtggtcaaggttgaccacaaggcccaggcacaactaccttggcgataatcttctagattcgtaacaggttagagctgactttttgtttttgttgttgctgatgctgtgtgattcagacttctcagcctaaccaggaagagtaagtggaaatggtagatgaagaaggggtagagctggtgtatctataactttctgatatttgtctgccaaacttgatatattagtaatttttttatctttagctaagatcaagtcacccctgaaacaacaggagattctagttttaaaataaggccacaaaaatccttacggaatgaagaatggcaccccagttggttgtataagtctcataagataatgatgttgattttaaatatggatgtctcaatgcctgttttctatcaatgatttgtttgtttccaaggtcggggagggaaagaggggagggtttatctgttttagaaagtctcagaatacttataaaatacagaagtagttattaaaatatataggacctcacataggtagatacagaacttaccattgaggctgatgggctgttgtgtgaatcacacaggaccttaaatgaggctcattattctcacacaccaaaatgactctgacagcctgaagcagttattgctagagcccaagctttccttggaggttttggagttaggttgattggaagtaaccagctaataccttttctagtggagaaaaagacattgctaccagcttgttcatcccatagaagtcttccactctgctccatttttagcagcaagcatttcatgtagcataaaccttggcagataagtgtgcctaaggtttatacagtctgtccgcttggatgtatacaaatttagatacatattttaacatgtgttctcatagatgactttataacaacacacattacctataggtgtctagactgtgtacatacaagtgtgtacagacaagcttcatacgtatatactgtaatccgttacaacaaataaattttaaatcatcgtttaacatgtatgtggtacttctacagtgtacattgttttcattatttattgtaacattgaaaaccacagtgcagggaaaacaaaagtatcccagcatcttcatcctgtacacttggaattaatttcatttgggcatatccaagataaactcaactttcaagaaatcttgtatattatttaatcatctgtgttaggatgacacctatgattgatgacttcggttgaatagctttattctggatttttcataactaaagctaaatccaaagacctgaaaaaggacaaaaagaaaaaaaaaaaaagaaaaaacaaagaaaaagaagaaaaaataataaagtcaagcgcaaactgatggggagacagtgggctctggtttccaggattgagacaatggtactgcggtcttggggagactgcgttagctagtggggagtggtgatttttttcatgcttgtcacatctaaatggtctttaacatgagaaagttttagaggttataatttcctgctttgtttttatttagactatcaaatgaagttatacatgttgtcagtcaaaaaatgaagacaccctctgccccaccccacagaatgctttttatcttgtctctttgggttatgacccaacaagctaagtaccattaatgtaattaacttatttaaattagttcctagtacataaatgtataggatttgggtaattatttaatcatccttccttagtttgattctactccttgtacttatttatcaaaacctagaccaatggtgcatcagagatgcaaaattctacttggaatactcttgaagtttagtttgctttataaagcagtgaaattctgttacagacagggaagaaatacaggttacaaaaagagaatttgggatattcttccctcttaaattaacttttaaaatagtctaagtaacaatttttaaattatttaacttaagttcgcagccccacctggtaccaggcgaacttcacctcttaattattgtggccctcggagccttcatattgtaacttatttatttaacttattcagcatctgtgaaaggtgcactgtatagtttatatttttaatttaaaacaacagagagcactgcagtttgtttgctgtcagaacaacagagcaaattttgtggacaagcaatgactattcagcctgaacctgtgcattcagaaaacataagctgagaccctgcttcaccagcctggatttcggggcttctatacagaaactggaaaaataaattttaaaaaaatcgtaaacaaaaagagagaaacccttacactagctgcttccaagaatgaactctgtgtgtatgtaaagcaacaaaacaaaaaaggaaaaaaacaaaaagcagaaaaaagaaaaaaaaaatgaaaaactttctatttctagtgagaaccaaagaaggctacctcactgactttttccatttgtaattttaatcgtgttgatgacaccaaagataccaaagatttctttctctgtgcggtctgcattttgcttgtgctcttttataatttgaacgattttctctgacatatggtatgtacagccacagctcagataccccaaagaaataattatctatgcgacggcggctgctaatttggaaagggatattttctgtgtttctcttatatgtttgctgtctgctcgacatgttcaagatgcgagttcagatgctgctgtaattggattccttaaattctgattacaaattgaggaaggaaactggttggaaatggccttcagtcctagccatggcctctatccccgctgggacctgtcacagtaaagactgccaattactgaaccacagaagctctgaccattgagtagttgagctggaagagaccttaggaatcatttagtccaagccccggtggcccagaggaatgaaatagttatccaaatcaaataactcttgagagtgaaagcccacacatgcctcctggttcctgccccagtgctccgcttattgtacagtgctacctctgcatgagagcggtcccacattgacaaataggatggtggcaatcctttagcaatgagcagggactggggtttatctcttaacattttcagctgtaaaattagtcacaagcattttcagtgtcccattagtacatagtcacatatggtcggttgcttcgtgaaggtggcctgtcttgaaatactagggctcatacgggatttttgccctaggaaaaacatgttgatcccaatgatgtgatcacttttgaacctttccattacaaagcattgtatagataactttttaattcagtaggaggagaaagttcattcttggcctgttggctttgattattatgggtactttaaagtcagtatttatcaagaaagggaacttgaccaccattggcacatgtgacatttaagctcttcagccttttcctttttagttgtaggtgtttacatttcatttctaagccaactctgtatttatgagagaagtttaagccttacatcatttgatactaaagggttatttgtggtaaatgaaaaatgaccccaaaattacagaggaatatgccagtttaagaaatggctacttaaagttgcttctctctttccttcttactcatgaaattaattggtcttcttcaagtttctttagattccattaaatgattaaatcactattaagagccattcatcaacgtgatttgtgtgttagccaatgaatctgtctcagcttttgaccaaatgggttttagacaaatgcaaagatctgcctctagtccatatggctctttttgagtgctagtattttgcatttcacataatgtagttattttgagcttttaaagagagcatttagacaaagaagcaaagagaggaagggaccaatcaactcatcagttccatgcatcaacaaagcatagctagtagaggaatataaatgacagattgacaaactgtaggaaacactgttactctctttctgaagttttcaagcaccatcctatgtgaaagttccctcctgtccaaacaagctcaaggcccatcttctccctatacaaggcaaacctgtaaggccttccttccaaagagtacattgctttggttttcttcctaaattcctattggaattagaactctcagaatccctgggagacagagcaaagatgacttaattcattgagcagcagagctccctataagtgaacatcaccttccccatctttcctactgccacacccatacgagagaggatctagaaagagcgatggcagcctgaacacagaaaacatccccacttggcagacctctcctcagcaatccccccagcctcatgcttcacttgcaaagtgtgacataaccacgggacgagtgccttgcttgaaccaaagcaacgatttagccagtctggacctctctgtgctttttttaattcttcctgtgaatacctcagcttcaactgggcctccatacagtcagttggtgggcttattgtactgtggtgctttgcaatgcaaccctgcaaagaacaagatttgtactaataccaaaggttctttctctatgtctcctcctctgcctccctcgttcttcccttttttctagttcttcacggttccaaagctttactatgaacctgggcatgttggcaatgcagaccgcgcaattccttaccgaattttctcagatatacctcatagacaatagtgtttagagtaatgttattatagcgtatgtaataaattattcactgtttcttttggtaactgtgatttaaaaaaagaaaaaagaaaaaaaagctttatacgttttaggttgtgcttttgtaatagatgaaaaaaggtgcgcttaaaaagaaaatgtatgtttttttccccctttggattttatttatgctggattggggaaagttgcagaatgagcccaaagtttacagtttcatattttgctgaagaaacaatctgtgttcatttgctctgttgaaaagaataattattttctacatttgtgccacttggtctgaacaattaattgttccgtgttaacagtgtagtattatgattagcaactgccaatcagtgctataattttatgcatgaggctaaaaatttagcagtgtgatgcattgtggtcttaatagcaacatttttcattttgaactagatcttcccctttggttcaatggactttatttatgcatgggcgcctattgtttgttagcagttgtggaacagttgtgtatacattaaactgtgaaaatgtacacagttcagcctcagacggtggtaatattggttttattgggagatgtgtcacctcgaaaataccctttacatctgttgggatctgaaaatgagtcacattgaattgggttccagctttataatgagaaacgttattcctaatttttgagttagccaatttgcattccacaaattgggatcctcataacccaaatatatcaccgtatgtgagagggatttgaaagcgagtattgaaaaactcacctttgcatatttaatttccaccaaaaggagttattttggctttatgctcatgaacttagacctaactggccatgtatatgtagatgcaaattcatctagctgtggccctctttgatctctgcttgggaatggctatttttgactatgcgtggtttcttctcgtattttgtgatcaggtcagctcccagtagaaactcaaatggcatcaatattactaactcttctctgcccacttctcttttgtccactctcctagacattcccaccaactgttccagtgatttgggcaaaaatacgcagccatttcccaaaacttcacatgtgcagctatcatggctgtccctccctagacttggaggtgactctcacttaatttttacctgcccaacaatgttccatctaccatctaaaaggtaatataagaagaagttttgaaacccactttaggaaaaccatcttctttaaatccttcaattatctgaggcctctatatgtcaaaactatttttcagttgcaggggattgggcaaacttgttctttcttatacttgggttcaaagacccattctccagtttcatatttcccaaaccaaaatgcttgacataaagccaaatcaactgccaagcacactttattttgcataggagtatgcagcctagggaaccttggttgaaaagcagcagtctgctatgcaaaatattggaaatcactgacagtgtagcattcatattatctgtcaatgagggtatattgggaacgtgctctcgtgaataataaaaagcaacatatttttatttggccttataaattaggttgtggtaatgtaaactttgatatatagtctttttatttttctcttattaatctgccaaagatgggaacagatacaagaatttttcaaattggcttttgtaagacaattgatgattgtaatagtgtttaatcttccagaaagctttatatgttgttccacaataaaattgatatttgtttcagcaaagttttcctgacactcacaaacccacaaactgttcctcttaatgcagatattgtagaatctacaaagttcaaatccatttttgatccaaagaaagtagaggagtatttgagacatgagtgtacccagccctttttttaatcacaggcaatgcatgggtctggctggttacactttgccaagaagacttgtcttatgaaacccaaggtatattttgttatgccattttatgtccttttcttttaacattgtggaaagtggtatgttgaatcaagtgtaagctgagttttccagacaactgaagtagctacatcatgaatgttattttgttattaaagggtttttactcagtgctttgtgccaatggatgtccttttccttggagacacataactacaaaattacctcagcttggcctggttttctctcctgccctcttggggaaacatgggcctggcctgggaaaaggcaggtcatgggctggaaggtaggttttggtactaggaagaaatctctgtatctgtcagctttaaagagaactgggccaaaaatctctaacctcactctctctggactccaacacttccctgcaatcctttggtcttgagcatgtgccagcatgaaggcagactccagttcatacatgaaaggcaagaaaaagaaaatagtaaccttgaatcttctgtgggccaccaggcactcacctttccccaccttgcacactatccagtcaaggctattgcagcccatctggtggctttacatgggacattaccaaaggcttcttcctccatcctggggttgcaaaggatccaggtcccctccatccagtggggctcttccacatcagaagtccccctcccaccatcctctgcatcctgtttagctatcccatctataccttttggagatgattatttagaaaacaaagaaaggtatggaatggggtttcctattgtttgctaggttatattttagcaattctcaattctttgatctggaaaaatacaagagggaaaaggagaccccactatctccctgtgctttgctcccatctcagggggcaggggcagtgcacattgcctatgctgttgatctgtcttgggcgacaggctgaatcacagctattgccccagccaaaaacatggcccatcaatgcctactttatctctgcttgaaaatcctattcaaaaagttgtagagtttgaggtttttatccccccatatcctttgctttggtccagtttggcctttagcataagagtcagctttatctctaggaaagttttttcagattatgacaaggaacctgccacctgggaagaaaagagtccgaagactagcaatcggataggtagtcataccattaacagatacttccttgaaggtagaatattatttcctttctttacagttttgtgttacacaagtccaagtggtgccagcaaacttcttaccgtgaaatgttgtaaaacacctggcatactgaaatttctgaaacaaaaacacaagctccacattgataacttgataaataaccactaaagtttagatgcagggactgagatgatacaggcaaaatcttggtgttggtttctcttttaattcgtatcttcgatcacctaacctttctcaatccaagagcagttcagtcttttctccccaagtctaggatgccaaagagcatcataggaaaagataattagggattgaccagcatttcaattagttctcttcttcatctttgcatttctcaaaagtgttctcctggaccagagggaaagagctggtccattttttttcattctttctattcaaatttttccacccagacaatactttattaacacagatactgtagatccttccttggtcagtgaattattacaagaggagctatccttccaccaaagtgagtgaaaacaagttccagtatcttttcttccatccagttttgttctcagaatccaagtcagtcctgggtcttttctcactttagaccctggcctcagatgtgtttattcttgctatttaaaaatacctttaaatttcacatgctggcctgcagaacttgcatcctttgttctatactgttgactgcttgatggtattgaaaggtgactataatgagggaagaaaggaggaggtaaagagagaagaatttgtcccagatctgtttaaagtttcaaaatttaaaaagggacccattaaattatgggaaaatggctatagagtgtgagcctccgttgaccatatgctcaaagaccgtactctgccacctgccttccaggtagctattctagaaactcagtcctttgtggaaacccaactaccttttaaaagtctctttccagattccaaaaggacaagagatcagagagtcacatatacgcctcttgttttattttcttgctttcacgggtattattgccaagaaaatcgtagggaaaaactttaaacttttcttttcagttgatccctttgacatcacctctcatgtttaaaatcaggaaaacacacccctaaaatttgcactctcttccgttttgaaaaagaaaacccacacacaaatgcacactattaccgtctttcaccctgcgctatatttccaaagtgtattataatccagatattgccccatctcaaacatgttaagtcagactgtgctgaaagactttccagggacggtcaacagggtatatgttcagtggctgccctgaaatcctggtggggatgaggatcacgcttcatcatcaaggggatgcccatcccctgataagctcccagtccttttggaagatttctttgaatgttaattgcattttcagttttgctcatttcccaccccaatgttttgtctgcaacatcgcttacactggattctttctatttttattcctatcattaaatggtagtgctgtaaattctgcaattaatgttaaataaactgctttaattcattgaccatggctcagttgccttctttttcttttcatggaaggaattaagcactcttccccctacagcaccccattgtggtttcataaaaaaacagtaaatttgttcttagtgagactacaatttctatctctgacagtatgcaagacacatcttataatcaacaaacctgttatccttgttataaatcacaaaagatgagagatgctccataaaaactaccttttttcttaacctgttaacactttagagatagcctgtcctagacttatctttgcacagattttgtatgaggtcacatatggtgagtcaaaagaaggatcatgttattgtcaccctatggaagaatcaagaaaaatagaccaaaaaaaataaggcctcatatgaaatctaaaccctgcaacaaattagttgtatggctttgagcaagtcatttaaatcatctgggcttcagtttctccacctgtacaaggtcaaggttaaacctggttttatcaaaagtcccttccatctttgcatttgccccagatttttgaaaatactaacatttttatacagattttatcttggcttattattttctctaagttaatgagctaatgagtttgtttattcgttttattttattttattattttattttattttctgagatggagtctcactctgtcacccaggctggagtgcagtggcacaatggctcactacaacctctgcctcctgggttcaagcaatcctcccaccacctccgtctccaagtagctagaattacaggcatgcacccagcttaattttttttttttttaattttagtacaaacggagtttcaccatgttggccaggctggtctctaactcctgacctcaagtgatctgcccacctcggcctcctaaagtgctgggattacaggcatgagccacctcacccagcccatctattcattttaaatttagatatctgagattggagactattattctaagtgatgtacctcaggaatggaaaaccaaatatcgtatgttctcactgataggtgggagctaagctacgaggatgcaaaggcataagaatgatacaatagactttggggacttggggggaagagtgggaggggggcaagggataaaagactacgaatatggtgcagtgtatgctcctcaggtgatgggtgcaccaaaatctcccaaatcaccactaaagaacttactcatgtaaccaaataccacctgtaccccaataacttatgggaaaaaaatttagatatccacaagcttcaaaggagtcccattgggttaacccttggtctaactcacctatagcccaggccatgaagcactgattgccttcatctagactggtggttttcaaccctgggtgcacatgagaatcacccagagagcttttaaaatatactgtacctaaagtccatcccagaccaattcatccaattccacaagtgtgggcctcaaacattggtgtagccattagcttttgctagagttagtttgttagtgggaacaaaccaccctaaaacatagtggcttaaaaagcaactatttttaactcataattctgttggttgtcaatttgggttggtctcagctggttagttcttctgattgggctgggctcactcatgcatctgtagtcagctccccagttggctgggggctggccagtctaggatggccttagtttaatcaactgagctctgctctcctttatcatccagcagactggcctgggtagggttccaagagatcaagtgaatcacacaaggccccttaagaccaaagcatggaactggtatgatcacttctgctgcatcctcctcactgaaggacaccataggtccagcctcacaggggtaggagtgaaaagagattccacttgttgatgggaaaagctgaaaaagcacattaccaactgagaagtgaaagacagactgtagccattttttacaatctaccacaatctatatttttaaaagctctcccagagattctaatgtgcagccaaatttgcaaagcattatttcaaagcctagtgtttttctatttttttctcacaattcaacacttatctgtgttaactccctcaaatgcctttatcgtgttgcttgaactcattgtatgaaaaaacaattcacaaccttcaaacttgtagagtaggtatcattacaggctgaatttatacagatgaaaaagtcttccacaaaccagagggatttagacactggttttattggcaggtgaactcgcagcctcagctgctggtggctgcaaccactcactaagccatcccatgtccagggctggtgggaagccctgggaaggcaggagccacacatggagttctttctgttggaggaatcttgggctgtctcaggcacatgctgagaatattactgggcctaggcaccgccttggggtccatcatggagatcttgactacaaagcagcatggcctctggttctaggatgaaatccctgttatcataatgtgcttttgcaccattcttcctcgaatgtcgtgtccttatttattcgcagacctttggacagaaaggagcatcttaagagaacagttgcataaatagtctcagcttatgccaatgctaaactagataatcaccaaaacctcttccacctctgctatttcctgtttctaatgatccatcactcttactcagagaaggaaacagtagctaaacctggcaaatttcaatgctaagaatctctggtctcagtttagccacatcaggatagccaaactaagagaaatgtaaaagtctaggtggggcctttgaatgagagattaggctcattgaaggaaaatacttccacactttgggagctcattggcatgagcccatttttttagcctctggttaagggcatttgatggtatgaagtatcctttagtcaaaatgctttaagttattggtaactgcccttgcaaatctattctctcacttttgtcttctccctggattcttccctccttaagtggggctagaaggggggaaatcacttgcaaaaataaaattaaaaggaagaataaatccatgtggacccattaagcatgaggaagcattgctcagtccacagtggctcactgagcacaattatttctagaattaatgatggtggttgccaaacttagaggcagccactatgctgtcacctccagaatcctccttccttgatctgcacaacaatcatttaggggacataggtagggcagggtgcaacaacctcaggaccaagaggcagaattagcattcaaactcagatgtcagagttgaccccgtgcagctggtcactcggtgctgcaccatggagacctggaagttagtagggcatgcttcctcgggttgcagtgatagagcatatattaccaagtcattcctgctatggagccatatcagctgtattccaaataagtcacacagacaaaaaaaatgccaggagttcagaagaaatggggatcatgccaaacggggctagttcaaaaagggctctctcatttcataagatttccaagtactacagttttattactaaatctaattgagcataactcaatgcatggccaagtgatctcggtttgtgggagtagattacatttctgcccccacgtagctgctcccaggtaactaacctaactaccccaggtagtattttcctcagattatcaatatgtaaatgtctggctcatgcctccagtagtacttctagctctgatttgagagagaaaccagcggtttgagtcagaagatgttaattcatgtcctaggcctacctcttactgatatgtggctctgggaaagtcatttaaattcccatctataaattggggataagaatataaattgtatcactgtcctgcctggttcacaaagttgtgtgtatatatgaatatatcgctattaaagacaaccaacattttataaaagagaaatctgaggctcagggaggttaggatacttggccgaggtaacacagtagtggagccagaatttgagcccaggatcgtcagcttcaaagcccacctgaaagtgtcaactaacatgaattcccctagtgacaggagagagctgcatcatggcactgtagcgaagcatgccacaagacgtaaactatttcttaacaattagctttgacaatggaagtgcaactagtagaagaatttataaacttcctcagaaataatgccgcatatctacaactatctgatctgtgacaaacctgagaaaaacaagcaatggggaaaggattccctgtttaacaaaatggtgctgggaaaactggctagccatatgtagaaagctgaaactggatcccttccttacaccttatacaaaaatcaattcaaggtggattaaagacttaaacgttagacctaaaaccataaaaaccctagaagaaaacctaggcattaccatttaggacataggcatgggcaaggacttcatgtctaaaacaccaaaagcaatggcaaccaaagccaaaattgacaaatgggatctaattaaactaaagaccttctgcacagcaaaagaaactaccatcagagtgaacaggcaacctacaaaatgggagaaaattttcgcaacctactcatctgacaaagggctaatatccagaatctacaatgaactcaaacaaatttacaagaaaaaaacaaccccatcaaaaagtgggcaaaggacatgaacagacacttctcaaaagaagacatttatgcagccaaaaaacacatgaaaaaatgctcaccatcactggccatcagagaaatgcaaatcaaaaccacaatgagataccatctcacaccagttagaatggcaatcattaaaaagtcaggaaacaacaggtgctggagaggatgtggagaaataggaacacttttgcactgttggtgggactgtaaactagttcaaccattgtggaagtcaatgtggcgattcctcagggatctagaactagaaataccatttgacccagccatcccattactgggtatatacccaaaggactataaatcatgctgctataaagacacatgcacacgtatgtttattgcggcattattcacaatagcaaagacttggaaccaacccaaatgttcaacaatgatagactggattaagaaaatgtggcacatatacaccatggaatactatgcagccataaaaaatgatgagttcacgtcctttgtagggacatggatgaaattggaaatcatcattctcagtaaactatcgcaagaacaaaaaaccaaacaccgcatattcttactcataggtgggaattgaacaatgagaacacatggacacaggaaggggaacatcacactctggggactgttgtggggtggggggaggggggagggatagcactgggatatatacctaatgctagatgatgagttagtgggtgcagcgcaccagcatggcacatgtatacatatgtaactaacctgcacattgtgcacatgtaccctaaaacttaaagtataataataataaattttttaaaaaaagaatttataaacttgcttgttttgccctgaaatgactattcataaaaattgccgtgagctgactaagccaatttggttatgcacaacatttaggttcttgtggtagctaatggtagccacccaaaggttttgagatgggcaagagtcaactacttccccacaacttcttgccagattttaaagaaagtgagtctgaaaccaaatgttgccacatataggtatttacttaacatgttttatttagaaaatcaggcacagaaccacacataccactcacggtgggagttctgtgaagtgtgagatctctgtattattgggagtcctaaccatactccagatagacctaggaacattttggaggcaggctttcattagtccttgggcagcatcagacgacaggtaatattctagactgaggactgaacacaggaacttttagggatcaaacctctcctctattccctaaagcaggctaaaggtttcactgaagtcttatactctgtccatgcaagagaacagagttagggcttccccaacccacctatctcaaatacctttaattttaccagtcaccagaatccatttataacattttccatgatacagtgataggcgactgtcttgtagtagactgagatgtggatggctgaagcactgttagtgaccagtctgcagtgagaacactctgaaataatgttcaccaactccctgttcttggttaggatgatttactgcctccatattgaaccttgaacaaacagacacatgagtaacaccaagctgtctgtgccaaagtttattaaaataagtcacagtcattgcaacaaagaagaaacatagtcccatcctgttgaagaccatatgttaatttcaatataatgacactttatgtgtgcatttattcatctcattttttcctgcagcctatactgcaggtattattattattattcccattgaataattaaatggtaaaagtttaaatcatcttccactgcctcatgtaataaggacagcttacatgtgtagatatttactctgtgctaggtattgtgctaaacttttcacgatttatctcatcttgttctatcttgtgaggcaagtactgtaattatccccacaatacatatgaaggaactgctctttagagaaataaagtaacttgcttcaggtcacacactagacaggctgactccaagcctaagctattattagcgtcgagttttccttcagccaatggcagagcttatcctcgtattcactgcttaggactctgactcatgtgttctttcaacagaattctgattgctaagcagctgagatgggtagaagtgaaggtaactagtgctaacgccctcccagcatctccaatataaatgcattcacagccgtgatgctgtggtttatggctgctcagaacttgctcacatttccaagtcttcatttcacccttggagaactccattcaggacatgtatgtagaactccatggagcttacaaccaatgatttgggatgtcccaaaccacacagaagcatacagaagtgcaggtgagatatcactgtgggctgtgcatattcacaggattgcaagagctgccacattgaaaccagatagaaagagcctggtattggcgtgaactagtggctacaaatacatctcctaactggggcactttgggtaacctcacttgagctttaaatggtctcaaaaatcatcattgccattgttgtcatcatcatcttcaccttcaccaccctggctgaatttttaggagaccagtaaataacactcctgctttctctttctgagtttagatcgaatagaaataagacacaaaaatgagagtctttttaaaaatcagctttattggtaaagctgattccccccaagctgagcttccccgcctaaatctgcagtccaattctttcttcacccgtcacagggaggcgggaaggagttactccaaagagcacttccaataaacctccacatgtaaattttggcttctcagagtctgtttcccagggaacctaacctaagacacccatttacatgcctccctttactccacctcttcccagaactggcctattctacaattagagaccttcctttcctaaggaaaaatgtgcaaaataaaatatcaacgttctctaagatctgctgtgagaaggtcaaatcagaacaatggacagcctccaaaaccatcctccttcccatgcttaatgactgcccactgctcctcagctgcctccctctggctgggcctcttcctgctcagcattctagagcagccccgcaggctctcctctacccacagggaagagcagaacaggagacaggaggtccttgttccttgatgggctgaagaaggatgttcatggtccactgtaccaatgaggcaactagtatcccttcagagaagcagttgcaccttccaaacccaatctggccatctagctactcaggattgagctatgctcaggcatttcttccagggacagctttcaaaaaccacaagtctaagaacaaagaatgagtttgtacctcctgcacgcaccatggaaaaccttacacacagagagaatggacagtagcctttatggaatatgagataaaagtgctacctgctctgacattgtgtctaaaaccccaccaacacagagtactggggggagggggcattgtcctctttgggtattcacttttgtttatctttcctttaaagtacatctcttacatttatatatatatatatgcaacattttttgttgtcacagctgaagaagtgttgctggcatctaaagggtagaggccagggatgctactaaatatcctgtaatgcacaggatggccacccgctacaaaggttctccacccccgagtgtcagtagtccaagaatgagacactctgctccatacccatttccttctctcatagcaatgttatcatttcttttgtatgtgttcacataaaatctgcattgtagggtgcatgcattttcaatttatgtaactagtattatattagattatctcacgctaccttatggtttatactgtttttgaggtctgtttatattactgtgtgcactctaatgcattgcttctgggttctacatagaaatccacagaatgcatcaccacattgttcccatccatcacctccagaaagggatccccaggttgcctcctagtctctaccatcataaactttgctacagagaacatccttgtgcatgttccagtatggccctgcatgagaacatctgtggggtaaataccaggagtggaattgctggatatcaggtagatgtattgtaaacttgaccagatattgacagacatctctccagaaagactctcccagtccatactgaaaccagcaggccatgacgctttgtaggtccctcatttaaaaggtactcttcttgaaaatgcacataacctatattaagattagcatattaaatcattattaccttccagatgaatccatcagaccatcttcctcacaggaagtagcttcagtggcctgggtgcctaggctagaaaggcttcaggtaggggttataagtagaaagaaaagtgggaggacccaaagacagaccctcttctgccctccgggaaaattttcttccctcctgaattcgctgccatccgttttaatggattgtttgtgtcttccattattaaactttctttttaacttttataacttcaacttgaagggtgttttctttttccataagcagtctcagcctaaatcaaggggaacaacctagagaaacagaagcacgcagggttcagacttctgagaggcattcatgctcatcgcggcaccgctcctgcttcctcagtcattcagctcgcccacgggatcaataaagcgatcaataaagcgatagaaccacaaataacacaggcctatcagcaatatattagcaaagagtgtttaaaagcaacttttaaagaagattcaataacattcgactccaaagttggccaactccaatgtcctgaagctcaagttcattcctaccgagttagcaaatgatggacaacgagcctgactgtcagacagatgggcctggactgctgggaaggccatctggggatgccagaggggttggaccgacaacagggagccccctgggagggtcttatgctcttgatggcagtgcttttgagggccaaatgtcctcagaggtgggtcaggacaaaatcttctctagaataaacagctccttcaggtaacaaaagggattttgcaaaaccccattactttctaatacttttttttttgagacatagtgtcactctgtcgtccaggctgcagtgcagtggcacgatctcagctcactgcaacctccaccttctgggttcaagtagttcccctgactcagccttccaaatagcttggactatagacatgtgccaagacgccagctaatttttgtattattagtagagatggggtttcaccatgttggccaggatggtctcgaactcctgacctcaagtgattcacctgcttcagcctcccaaagtgctgggatttcagggtgtgagccatcgcgcccagcgtctaatacatttttcacctcagaacaaggagtagctactaggaaatccctttttatccactctcatgggtcattaggcaactgagctgagccctggggttcccaatgagcaccacccccctgggagtttcaggccagagacagaacacctgctctctatgaggtattggacttgatgttcaatcaggcaaaaggtaatatatataaactactacaactgggcctcacacacagtgtgagctctacaagtgattgctattcttattgttgatcatcataattgtcatcatgattattagattctgaggattcaaatgtacgtaagacaaagtcctttctttcagggagtttgtaggtaagtagtgcagagacatataagaaaccattaaaaaaataagcatgtagaataataattgaaagttacaataagggcagtggaagaaacaaaggcctggaagagagaattgggatgattcagggaattgtaaatgggattaagctgtaaaaaagaggaaatgctgctgggcacagtggctcatgcctgtaatcccagcactttaagctgccaaggcaggaggatcgcttgaacccaggagttcaaggttacagagtgagatcctgtaagcaaagcaaagcaaagaaaagaaaaaagaaaagaagcaaagaaaaggaaatggaaaaggagaggaggaaaggagacggggagggaaggggaaaagctgggtcccgtggcttacacctgtaatctcaacactttgggaggccaaggcaagcagatcacttaagccaaggaactccagactagcctaggcagcatagtgagaccccatctctataaataatataaaaattgtctgggcatgatggcacatgcctgtagtccaagctactcgggagggtgaggtgggaggattgcttgagtccggtaggtcaagacttcagtgagctgtgatcacaccactgcactctagcctgggtgacagagtgagaccctgtctcgaaaaaagtaaataaataaaagaagaagaaatgaggaaatgctatggcctatggtagctttgggctctgtccacttagatcttgagttcccagaattttcttccctgattagttgggggttcatatgaacataagagacattttgcacaagaaactggaaatcaaaagtaaatgaactggctttttttttttttttttttttatcctaggaagcacagtgcagggcaccggtgactggtgctgtcacagattacacgtgctgtccccgatccccttgttggtgcagggcagcagtccaccccgcagctcctgcccttgctcctcctttagctgctccaaatcctgggctggtgacagcagctccatgaagggtgccagctttttctgcagcaccagcatcgtgaaagttgactgtcaggaggaggcagtgagggacggatgtggattccagctcatccgcggagttcccactcatttttcttccccccagttcacattcttagattgcttgtgcttttgctgccacacctaagatcccctaatccaagatcatgaagatttacacctatgttttcttcgaagagttttataggtttagccctcacatgtacatgtttgatccacttcagtttttgtacatgttatgaggtagaggtctagctgttgcatattttcccagcaccatttgttgaaaagactgttctttccccatgcattgtcttggtagctgcactattttacattcccaccagtaacgctggaggattccaatttctccacatctttgccaacatttgatattgtctgtctttctgattatagccatcctaaatgggtgtgaagccatatctcattctcattttcatttgcactttcctagtgactgataatgttgagcatattttcatgtggacattgatttttaaaataaactttatgttttagaacagttttaggtttggccaggtgcggtggctcacgcctgtaatcccagcactttgggaggccaaggcaagtggatcacttgaggtcagaagttcaagaccagcctggccagcatggtgaaacctcgtttctaccaaaagtacgaaataattagttgggcatggtggcacacacctttaatcccagctactcaggaggctgaggcaggagaattgcttgaacctgggaggcagaggctgcagtgagtcgagatcccacaattgcacgccagcctgggcaacagagtgagactctgtcaaaacaaacaaacaaacaaacaaacaaacagttttaggtttacagaaaaattgcaaagatagtactgagagttcacacataccccataaccactttccactataattagcatcccacattaggacagtacatttgttacaattaatgaaccaataatggcagattattattaattaaagtcctttttttttcagacagatttcctttgtttttacttaatatcctttcctgttcattccatgttatgtttaggcatcctatctccttaggcccctctaggctgagacagtttttcagacttgccttatttgtgacactctgggcagttttgaggagtaccagtcaggtatttcatagactgtactcctattgggatttatctgatgtttttctcatgattagactaaggctatgggtctgggggcaaccacggaagtaaagtcccattcttatcacatcatatcaggggcatacactattaacatgacttaccattgttgatgttgacctagtcacctggctgaggtagtgcttctctgtttcctccactgtgaagttactctttccctaccccccttccatactgtcctttttggagggaagtcactatgtgcagcccacatttaaagagtgggctgtctttcttcttttccactttctgtcccacgtttcccatcttttcaaaatcttcagctcagctcaatcctagacaggggcgaagagttcatttgcagtgacacagagctgcaagctgcttcccttcctctctttggccttgccaagcttggactcaggaggagcagccccatctttgagaaaagttacctgtctctatatctcccgttgcgatggagacaatagtgtcagagttcctacaaaagtcccaatctcagcagtttggtccagcattccctaaatatgcttcaatcctcaactcaggaagaaaaagaaaaagttcatcagatcattaatgtgcatgcacacacacacacacacacacacacacacacacacacacacacacacacaaagtgtgatgtagagcagaccctccgcaaaattctgaagcagaaggaatttatctttgatgtcctctctcttgccttttcaggctctccctagaggtcccccatgaaagcccccatcctggcctgttctccagtagccctggatctctttgcctctcctccttcctaaactgggaaacaataacaagctaattagtagctgggattgcaaactgtgtccaggacaggcagagcgggatggagacaccaaactctctctaggggaagaaagaggccagggagtgtgggttggcaaaagcaatgatttttaattcattcacctgttatttcttgagaactttgaaactttcctacttctgtgctttcaacctatagaaaacgcagtcatcattgaacagtgaaaaattgattctgcttctaggagtttctatttagccaggggatctagaggcagctttagatttacatttctatcactccctttccaagcctgattaaggtaacctgtgcttcccaattgccccgttatttttcatagtggttacctttggcttctcacattcccaatccaactccattttggaaatactagtcatttctcaaaaacttaggcaactttttccctgtgtgaagttttagaaaaaggtttattttcccctctaggcttattttacttggctgaagtcattggagacaacatagactttgcatttttatcaggcctctttcaaatgtgctggcactgcagttgaattccaatgactgcattcaatgatttgcagtagagactatcaaaaatgcccacttccaaagctttcctgttgagaaaagtccagacagcacagcatttactgtctatttatcctcaagataagtactctgtcgtcttattcttttcacagataattatgagcactctcatttgggcccaacatttatgttaacagccaaaaacacacaaaaagtttaagataatccactttccttcagaagctcgtaatccaattgggagtcaaggtacacacataatattgttaaataacattctaaagtagtgtgaatatgtctgaaataagtactctaggacttacatatctacagtagtcaacttatgggacaagccctcattccaacagtactgccatggctcaaaatgtgtacatttgttacaattaatgaaccatccaattacaattaatgaaagatccgatcaatggacctttcatagggttaactccagtgctcgtttaacaatcacaaaagaaaaccagcttgtctatttcaatgttagagcttggttttgtggttgcttttaatattatagcttcctatttgatcacccactttctaaagctttgactagaaatgactttaaactataatcaaaataatatccattctcaaaggagtatttttcaacctgtttcattctcaatccaccagcctcctgccatcttgatttctatccagtctagagcatggaatttaatctctagtgacactctgcccaagctcttaactcctttgcttctgtgggcttccattccacacacatggaaacaccccagcctaggattcattccactttctgcctccttggctttacacccaggtcctcagaaactgggagttctccttggcttctctctgtccctcatcctttacatgattggtgacaatttcacttgctcaatatctctcagatctgcctctttttctgtccctctgccactgccccgtctcaaggaccctcatccatcatttcaatattggatctttaaaaagtgtcttgactgatctttttgcctacaggatggtctctctccaaatcagtgtcgacactgcagtcagatcactttttctaaatcattaatctgattttgtcacttcctaaaacaattccaatagttctccaataaacattttaggataaagtccaaagtcttagtgtgtctctcatggcttttcttgatctgaaatctgtccatcagcctcacctattaccatccagcctcccaccctagagccactggcaggtacctacaggctccatccacttgtttgcccctagccctttatataccctcttccttctttctggaatacttttcattggctgatgaactcctactcaccttttaaggcctatgtctggattgaaggtctctcctatgcccttccatgatccttccagttggggatctaccccttgacttgctatcgtcctcattgcactgtgagttgctctgaagtaagtgctgaattttactccttttcatatccccagaatctagcatgatgtcttccacataactgtactcaaaagtgtttgctgcataagtaaaagatttgatgccatgaggacattcaaaaggaaaataatagctaatacttgtagagaactcactatgcactaggcactgtcccaggcactttatgtgtagtatatcttctttttttttttttctgtttgagatggagtctcgctctgtcacccaggctggagtgcaatggtgtaattatagctcactgcaacctgtacctcccaagttcaagcaattctcctgtctcagcctcctgactaactgggataacaggcatgtgccgccatgcccggctaatttttgtatttttagtagagacgagatttcaccatgttggctaggctggtctcgaactcctgacctcaagtgatctgcccttagcctcccaaagtgctgggattacaggtgtgagccacggtgcccagccgtatctcattttaattattacaggaaactctgagagaggaactattgttatcctccatttcatagatggctcacaaagagtttaagtagcctgtcccaagtcatagtgggctgcaagctttcaaaaggcaattccaagagaagaattcccaggaccaccttctctccctggtaagagactgcaccaatgactgcattattggttactgatgatgtcacgctatttgcagctcttgccatcaggtacaaacagcccctcaagagcactgaagttatcatctaaaattacttttgctgaatgatgcttcccaggacctccatatgagacaacaaaagcagcaaggaaagttgagagtcgggtaaagatgattctttctagagtcaaggtgactaagccccagttcatgacaggcaattttccgattgattcttgccttttgctatatgagctggatgattgcctcatcacagaaccctaaacttactttgctcaggcttcctgagcacaagaatgggggggtaggaaaggctttgtcacagtagggaactttccacacttgccagagaagatcaacatgagacaaaggatgagtatatatgtgccacctaccttctcactcccctatggttatttgattttctgcagatcttagagctccagagagctgattttctgaccattcaagatgccaggatgatttacttacaggtaagttgataaattcatcctcctgctctatgtctgtaacaggactcgacggtgactgtacgtcaatgtataaagttcaacaaggaattttatgaacgtcaacaggtctcacggcttctgccccaagatttttcctgactctgtctactgccttctgacctcatttcccctccctcctcatcaaactttaggacattcatcttctagctggtcttgttcctttctcatcttccctcccttcccctaagacattatccatactacagctaaaattaaaatgacaaagcacgggtctgattatggtgttcccttgctctgaaaacctgaagtctcttcagttggctacagagtagtgtaaacaccgtaagttggcatctttcctgcttcccagcctcctatcccacttccctctttcttgctccagccatgtgtcaccacttacttctccccaagaactcccatgcactttcccaactccatgttggaaaatgcctaggaatatccttctctatcccatctgcctgctgaggtactcactgtcagtaaacgaagactaggtagttcagataaatccttcctcaggaaataatgaggaaatctggatgaaatacagaaatattgtattaaaagcatcaacaacctaataagatggtgaaaaactgctaaccaaagtgtgggaggggccaggcacctagagagataaacatcgcttggggaagctttcacctgggagcctgtactgatgcagaagagttgagatgctgggatgtgcttttggcagtctctcaaaagttaagggaacaaaagatagactggtggcctaccaatggctaggatgcttaaggactgcaccgcaggcatttagatacctggaagtaaatcagtccacatgcggtcatctgttcagccaagaaagtgtcaaaacttgaatgtgcatcaagtttgctgcccaaaactgctagcatccccaaggattgtggcagaaacaaacaaacaaacatctctccgggggaagataacatcatatgaggtcataaatatttctataaacagtctttcaaacacaatgctcagcacacagtcaaaataaccaaacttctccaggagtggggcaaaaccagaaactaatattagtctttgataactcaagggtgcatatagagtagcttctcatgaatagaaaataagaatggaatacttcttaactaataaggaaaaaaaatggaacaatagtattaataaacccaaaagaaggcaagaaattaaaaaaaaaaagggaacacagagcagggggcacaaattgaagagctattcatcattcaaggtgcagctcagatatcctctttttccctaacaatcccttatctcctcccaccagtccagtgctctcttcatactttatttcaatttctaccataccgtttatcccattgtgctgtaattaattgttcaagtgtttactttcccagttgtattttgcacaccttgaaagaaggtgttctgcttattcatctttgtatcttcaatgcatagaacagggcttggctcacaatacacattcaacaaatacatattgaagtaaatttagttgaaatgaactaactaaaaaaatactgaggtgtgatgctggtggagctgtcagtgattgttcctgcctgcagagaggagcacatggctcaaggaggctatcacgttacttattccccatatagagtattaatacaaaggcttatgacccaagtggtgctaatcttccataaaaattaggctgggcgctgtggcttacgcctgtaatcccagcactttgggaggccgaggctggcagatcacctgaggtcagaagttcgagaccagcctgaccaacatgtagaaaccctgtctctactaaatacaaaattagccaggcatggtggtgcatgcctgtaatcccagctacttgggaggctgaggcaggagaattgcttgaacccgggaggcagaggttgcggtgagctgagatcgtgccactgcactccagcctgggcaacaggagcgagattccatctcaaaaaaaaaaaaaaaaaaaaaagaattaatatacaggccaggcacggtggctcacacctgtaatcccagcactctgggaggccgaggcaggcggatcacctgagatcaggagttcgagaccagcctggccaacatggtgaaaccccatctctgctaaaaatacaaaattagctgggcatggtagcacacgcatgtaatcccagctacttgggaggctgaggcaggagaatcagttgaacctgggaggtggagattgcagtgagctgagatcatgctattgcactccagcctgggcaacaggagcgagattccatctcaaaaaaaaaaaaaaaaaagaattaatatacaggccaggcacgatggctcacacctgtaatcccagcactctgggaggccgaggcaggcggatcacctgagatcaggagttccagaccagcctggccaacatggtgaaaccccatctctgctaaaaatacaaaattagctgggcatggtagcacacgcatgtaatcccagctacttgggaggctgaggcaggagaatcagttgaacctgggaggtggagattgcagtgagctgagatcatgctattgcactccagcctgggcaacaagagcaaaactccatctcaaaaaaaaaaaaaaaaaaaagatttaatatacaaagaaaataagagataattagatttccttttgtatcacacactatacaagtataagcttggtgattccagaaaccatcttccatcccacatggtgaaagtcacgtgaaagtggggcagtgcacaaagcaaaacagaaccagagttggtgagagagacaaatccctgaaaacattgaacccctggattcagctatgactgaacacatatccaccttgacttccttggctaatagccgataaactccttctgttgcttaagctaatttgatttgtgtttctgtggcttggaacaaaaaagagtcctgacaaatacaagagacttctatgagaaattctacatatgaaggctcttgcactagtttgtattgggatcggcaacaaggtatagatggtcagaagacactggaacactgatagatctgactgtaaggaacataaaaactcagtaactctgattttttagccaacagattagaattcatgcatccatgttctcactcataggtgggaattgaacaatgagaacacatggacacaggaaggggaacatcacactctggggacagttgtggggtggggggaggggggagggatagcattaggagatatacctaatgctaaacaatgagttaatgggtgcagcacaccagcatggcacatgtatacatttgtaactaacctacacattgtgcacatgtaccctagaacttaaagtataataataaaaaaaaagaattcatgcatccaaatgtgtattgattctttcatagtagctaccttgggaaaccaaatatttattccagccatttgacaagaactaagtgaaagggcaagagtttctatggaaaaggcccccaaattagaaggagcatgaggtttagaggcaggtggaaacatgagaatgggaagggtcaatcccagggagaggggatccagggaccatcccacaaagagcaacgaggtctggaactagccaagcgctagcagccagctcattgtccaaggactcttgagaagtggggacctgagcctctgttttgagtcttgtagacctagctttctggggcctaccattccctgcagagggcaaggcctgatgatgagtgaggtggaggagcaaggatgccccttctcatgggaaagctctgagacatgcccagacaccgtgtcccctgagtgctcatgctgctgagaatatgcagagcccacgaaccaacacattaaggtggatttgcttcggaccagaagcatgagtcctggacagcctagagagcccttgaatttcctcccttccctgaagaaatgagtaaggatgctataaatttccttattccattttcaaaagcctcagtgaaaatttgcttcctctctgtgtccatctctttgacatgtatatacacaatggccctgacaagaaaagtccctctcttgtatataagctgccatctctctccgcaccaccccccatgaatgataatacaatatttattaaggcttaaatagcactgttaagtgcacatgttgatttagaatgatggagtgtgtcagcgtacagaacaggaactcagccacagaccagggacccacaaaggacaaggagatatatcattagctaaagacccaagctagcaaatgtcatcagcagagacaaacaagtccttaattagggcttctttatacctactgttaacaccaatttttataagtgtattttcaaaaataatataacattatatatgcaaaaggttaaaacatttaaactgtacacactggtatgaaataaaaagcaaactcccatctgctgtctcccacacaagtcctttaggaaactcttttaagctttttttttagttcttctgataagttaccaccataattctaaacaatatgcatagatttcaattttttggcttatcatgattagataatatcaagtcatttgcactatttaatagaggaggaatttagttcacttgcaatattttcaatcatctctctcgattttgagtttcattatattattgtatttggttcttcgagtagtgacctttttatttttaaataatatacattatcctttatttttgtcccatcttctttccacaatatctcttgtctcatcccaaagtcaaatgaagaaagttgcacctacacttgcccttccccttcctgctcacaacttgaattcccctagcttgggcatcacctacacagtgtcaattgttagacgcacattctagtctataactgccttctgttttgattataaaaattgaaactagcaagcatttagttataactatgtaaatgtgattatgtaattattgatcactatagaaagagtatgatcagacccactgaaaaggaaatatgatcatatatgtcgctagctgactctctctcgaagaatgttcccaggagaaggtcaaatggattctcttttcttacattccatcagttgctcaaaaccaggccacgtttttggtggttttatatttgaaccaaagctttcttctctggtttttccattatttttttctctctggtttttccatttttttccttggcatttcaaattgtgcttcttctttcttgaatagagggggaaaaaaatacacctgtttctttcccactgggatgagattttccagcttcttcattgttctgcctgttaactgatccccattctatgcttgaagtttcattcagagtcttctgacttcatattctgattcgagccgtgtttttagacctgctgtggaagtgtcccccgagattcctttctgtttcacacctagaagcgtggcactgtttcttggaccatggctgcttctttctctcctacatctagatgattggtaaataaagatcctgaattcatccagaatccagcatggctggaaaagtgtttatttcaccttcatatttgattaacaggttggctggatattaaattttagatttaagatcttttcttcctccaataaatttagactataatcttttgaccaggcactacggctcatgcctgtaatcccagcgctttgggaggctgaggcaggaggattgcttgaggccaggagttccagactagcctgtgcaacatagcctgggtctctatgtattagttggttttcatgctgcagataaagacatacccaagactgggcaatttaccaaagaaagaggtttattggacttacggttccacgtggctgggaaggcctcacaatcatggtggaaggcgaggaggagcaagtcacatcttatgtggacaacagcaggaaaagagagggtttgtgcagagaaactcccagttttaaaaccatcagatctcgtgagacccatacactgtcacaagaagagcttgggaaagacccgccaggtccctcccacaacatgtggaaattataggaactacaagatgagatttgggtggggacacagagccaaacaatatcactctacaatttgaaaaaattaataaataaataaatactataattttctgtcctgtgttttgatgggaaatctgaaatcgatcataccctcatccttttttatggatcatctctctctctctatctctctctctcttttcctgtctttctctctctctggatgctgttataatggcaatgtacaatagaaacataacgtgagcaacataagtaatttaaacttttctagtagtcacattaaaaaagtaaaaagaaacaagtgaaattaattttatagtgtatttttatttaacccatttctgtatatccaaaatagtatttcaacttgtaatcactatttttaaagctattatttagatatttcacattacttttctcatcctaagactttgagatccgtgggtgttttactcttgcatcacatctcaatgtggaccagctgcattcaagcactcggtatccacacatgacacctggctactctgttggacaggcccagtccagaatcgtctctttatctctgtggtgcgttgcttcacctacagatatgggtctgttttcattttcttgctcagaaatcagtgcaccttttgaatttgtaatcttgtgtttttctttaattgttaagctcacactacttcaatttatgtgttcatttcctctttcctcctgttctttctctcatcacttgaatgctgaatctcctggaataatattttgtctcttaattttaacttcatgcttttcatcttttcaccattttgctctgtgctctaagagattttatcaaattcatcttcagtcattttattatattttttaattttggcaattatatctttaatttccaattattcttttttgtcttctggagattctttttcatagtagcctgctccttttttttccttctacttctggttccttcttaaacaaaaaattttttgagacaaggtctccctgtgtcacccaggctggagtgcagtggcgtgatcacagctcacggcagttttgaccacctaggctcaagtaatcttccaatttcagcctcccttgtagctgggactacaggaatgcccaagaaatttttttttttttagagatagggtctcactgtgttgcccaggcaggtctcaaactcctggattcaagtgattgtcctgcctcagtctcccaaagttctgggattacgtgtatgagtcactgcacctggccaaaaaaatatttttcaatttacacataataattgtatgtatttatggggtacatagtgatgttgcaatacagtgatcaaattagaataattagcatatccatcatctaaaacacttaacatctttgtgttgggaatattcaatatcatagtagcctgttcttgttttatggatgcaagatcctggatctctctgaggagtctagtaagatttttaaaattctctccattcctgaaatacattttttcattgggttttgttgttcatgttaatgttagtcttctcttgtgtgcaacttgcttccttcattgtctgttgtccttgggttggcaacattgtctactatgcgttcatctgcatgaatgaaacactaagttgactaatatgggaagccatggtgggcttcctccaagaaggtatacatttccacacatgacctcacctcttatctgaattgggatggttgtggtggctgacagtcaactcagctcttgagagctggtacctccttacacccttttccccaacccagggccacaaatttaaaaaggctttatagtaggtgtattagtcagttttcacactgctgtaaagaaatacccatgactgggtaatttataaaggaaaaaggtttaattgactcacagttccacatggctgaggaggcctcacgaaacttacaatcgtggtagaaggcaaagaggaagcaagcgccttcttcacaaggtggcaggagagatatcgtttgaaggaggaactgtcaaacacttataaaaacattagatctcataagaactcactcacttccatgagaacagcatggaggagactgcccccttgatccagtcacctcccaccacgtccccccatcgacacatggggattacagggattacaattcaagatgagatttggatggggacacagagccaaaccatatcagtagggcaccagcatccacacagggagctctagccttctctaggcagctcagttcattcttagatacagctccgttgtgatttattaattgaatctcttacagaaactagaatctctgggctgttgatgctgtccctactttcattcttagtgccattatggatttttcatttttagatgtctttactgtcctttcactgggattttgtgttcatctgccatcttgcactaacggatcaattacctttaagggaactattctgcctcccctaaagccattgttacctataagataatgaacaaggttttgacttttgaattttattttcatgctagaatttctattgctacttgtgtccaaagcacagtgttttacactgacaaatagtgatccatctcaacagaaatttaaacagagcccaggtacatgggtatgttccaattttcctctccagagttctttttttttttttttttttttttgagacgggggtctcactttgtcacccatgctggagtgcagtggtgtaacctcgactcactataacctccaccttccaggttcaagcaattctcctgcctcagcctcctgagtagctggaattacaggtgctcaccaccacacctgactaatttttgtatttttagtagagacggggtttcaccatgttggccaggctggtctcgaactcctgacctcaagtgattcacccacgttggcctcccaaaatgctgggattacaggcatgagccaccgtgcccagcccagagttcttaaattgaaacattttttaatgagatgtgtagagatatggccaactcttgtcttctcccttaataatcagtggtttcgtagaattgagaagtgagggttgttctgtaatgttccatctacaatagagtgggaaaacgctggtctaatggtgaagggaagtggattccagtatctgcatagtcactctcagttctggcgatggcccccaacgctgtgcctcagtcgcctcatctgtaaagagggcataaacactcttcttgcatgtctcatagggctgatacgaagaggaaaagagctgatgtgctgacacatactcagtactcactgagtattcgttcatcgattaaacgaagggttcaaggcaggggtctctcattaaggctgtggctgctctgtggctgaaggccatcagagatgatcaacctccttgccagcagccagcttggcatgcagagtggatcaagctctgccatctctcccagaggtctttccaggatgattttggtggtcactgcaaaagcaaagatatactaatcaccctgatctgaccactgtacattatatatatgacaccatcactatgtatcccataaatatgtataattattatgtgtcaattaaaactttttttagagcaaagatagccctcttcatggccttccccagcttgctggccaccggccttgagaagccaacggtttctcatacgatggaagagaaacaggaacagctgcctatgttaatacaccaggaaggccagggagccgatgggaggctggggattatgaagggcctaatctcatactcttcatgtagacacgggggaccaagtggctctgagagggaaaggatgtgctcagttagtgacagagccaagactagagtgttttgtacttgtgtgtaatcatcacagatgccatcacccaagaccacacctcaccctaaagctccattttgaagcacttcctggagtgggtatctcttcttaccattgcgaagctgggttttgggaaaccgccctaaacccacctcaagcccaagaaggctttgaccccaaatccatacaaacacctgctggaactcacagttggaagagatctcttggagagcatgttccacttgcccagtccccaggccactcttttttacagtgacctccaaagcctctggacccagctgccagctccactcctggctctgaggtcccccctggcaggagcacacatgccacagctttgcaccaaatccccaaagtgcccagcacattccaggctcccactgtctccaagggaccctagggccctggtagaggagggtaatggcaggaagccataatatattaaaacagcagattaaaacaaacaagagcattttggatcgtattacacatcactttcctcacatctgacaacagaaaaaaatcaaaggcggtaaaagacaatcgtagaccataatggtccaataacttggtgataaaagtgcttgtgggagcagcgtgggcgtcggcggctccgggtgcaggaatcaaagccctcttccagatccacagtggtgtattcagaggcattactgcttaagtgctcgtttaagacttcctccaaaatgcagcgcacttgctggagaatcataattaggccccaactgtgggccatattcacacattgtgcatcattcttaaagatgacagaaaaaaaattacccagggctatgtggcatggatagtagatcttttaccattgtcctccatgaaagaaaaaaaaaaaacacttaataatcccctgcctagactcatagctttttgaatactgagcaatatgacttagttttgttttcaaatggaaaaaggaaagctaagaaaacagaaggctgtgagcagtggaactctggggtttattttacagcctatagatgtggtcaaatccataggaaagtggagtgtaaaggatcttccatttatgaggcactgtccaaaccaaagtcagaccaaaattccagaaaaacctcagattgcgttaggcaagagtataccaccccagatctgattaaacatttggaacgtgtcaacttctgaaaaacactttcatttatttatttatttattcatttattttattttattttatttattttttcagacagggtctcactctgttgcccacctggagtgcagtggcagaatcttggctcactgcatcctctgcctcctgggctcaagcaatcctcccacctcagcctcccaagtagctgggactacaggcgcagaacatcacgcccggctaattgttttttgtattttttgtagagacagggtctcaccatgttgtccagactggtcttgaactcctggactcaagcaatctacccatttacttagcatcccaaagtgctggaattacagaagtgagccaccacacccggctgtcatttaatagtctgtatgctgaaaaaaaatgccacaaaaatgtgcagccatttttccatatctcctccccatttccttccctaccttctcaacccaagcccatttccatccctatgttttggctcatgggaaagagctttctaggaattgaaaaacaaatctgcccatgactcacattctccatgccagcctcagtgcctggctcactgctgcctttgcccccagggcaaaggtttcttgggagaacttcgttcaggtcaggtcaggtcagctccccaggaaaacagacctaaacctgaattgaggtcatcctcctcatttttaatctgaacttacctactgctgtcattttttcatctgcttttttcaactgatcccctaccccaaaagtggcatctacttattgttttttgttgttgtttggggtttttcttgtttgtttgttttcatttttgttttgagagggagtcttacggtgtcgcccaggctggagtatagtggtgtaatcttgactcactgcaacctccaccttccagattcaagcaatcttccaacctcagcctcctgagtagctgggactataggcgtgcaccatcacgcccggctgattttttgtgtttttggttgagacaggcttttgccatgttgcctaggctggtcttgaacttctgagctcaaactatccacccccatcagcctcccaaaatgctaggattacaggcatgagccaccatgcccaacctatttatctcattctattcacatagatttatacatgtgatttatagatttatctaaaaataaatagtatattttcatgacaacgctgggtggtcagtgacagattgttatttttcgctttacagattctaaaatctgcactttcataagagcctcatagctaatgaaggaggtatattacaagtcagtgagaaatgaatgaattctttgaatgtgatttggaagaaattggctctcttggtggtgtaaacatctaaatccttatctcacatcataaaataaaataaactgacatattaaaattataatacctgaaaaacatggaaaaccataagaaaatgtagataagtatttaatccttgcattgaaagaagtttctaagtataaaataatgaaggaagtcacaagggaaaggactaacagactacacaaatattgtaaacatctagatgtcaaaaaattaaaagcaaacaataaactgaaaaaatattagccacatacatgacaggcaaaaggttaatattcttactatacaaggcattcatacaaatcaataagaaaaagaaacagaaaaatgggtaaagattatgaatagataatttacaaaagagaaaatacaaatgtttggctaatacacataagaaagctattcagccacaaaaggaatccaaaaaattaaaaataaagtcaccagagatagcttcctgcttatcaaatcagaaaaaaatagaaatattaatagtactggatgctacaaaagtgaagtgagagaagaatataaattatatgacctttctggaaggcagtttgggcaatgtctatcaagaaccttgaaaacactcgtgttttctgacctggtaattcctttttaaggacttcatcctaaaaagtaattagaaatgtgggctaagctgtttgtaaaagataatccttagagagtgagttataccagcaaaataggtgaacaatgtccctcacccagagagtggcttaaattatagtgcatctatataatgaaatatcgcaaagacattaaaattgaaaaataattttagtggcaaggaaaaatacccatgcaatagtgttaaatgacaaatgctgcctgcaaaatagtctatagtatctcaaatatataaatacatgcttaggagaaagaactgtaaagtagtatcaacagtgtttaccagtgagttgaagaatagtacatactttaaaaaatgcttttctaattttttacaataacaggtatttattttataatcagaaaaatagaactgagaaaaccctctttttattttttaatactgatattccatttatgtttttaaattttttattttaaaatatttaactaacaaagattgaatatattcaaggtgtacaatgtgatgatttgatatacgtagacattgtataatgataaccacaatcgaattaattaatacatcaattaccatccatgctgtccattagattttcagcacttggtcatcttataactaaggttgaaccctttgaccctgtctccctgttttctccagcccccaccccctggcaactgctattctactctctgcctcaatgagttcaacttttttaggttccacaaatgcatgagatcatacagtatttgtccttccatatctggcttatttcacttagcacagtgacctccgggttcatccatgttgctgcaaacaagcttctctgttttcaatgaaaaagtttcaaaaaggtaaacatcataatggaactccacatctggtcacataaatccataaccacagttttttctgccctgtgaatttttcattttacagtaaggacaaaacatacaagtacgaagcccacaatactttaaaatcacttctgagttggtcaatatacataattgtaagtatatagttattagtaatcaatcctaattagtgtttctgtgttttgctttgtctatttaatatgatttaatatttaagtgctcatgtgtcagcatagtcaacatgtgtaacttgttgacagtgtggcaatcactgctatgtgttcaccaaacaattccccttccaccctgggcttatagcaagactacatttcccagcctcccttgtagttagatgtggccatgtgactgggttctgactcctagaatgtgggtagaagtaatgttgcctccagacctctggatctggctcatgaaacttcccttgcaatcctctgttctcactctcttccctcatggatctatcagatacagggaggaaatggtggagccactaaacacagaagcctaggtccctgagtgatggcatacagaaacctctctccccaacagacccacattgagttgcaatgtgtgtaagaaataaacttttattgtgctaagccaccaaggtttgtggttatttgttaaagtagttgtcctaccctaagcccaaagacttagctactatcccattgtcttgacagatcgtagtgcttaaccactttcccttcttggatattttcattgtttctaaatgatgccgtgattatctttgaaaaaaattatggtttttcatttgctccctttggcttatgcttatggagtatatttcccaaagtggcattaccaatgcattatctgaggataatgttcatagttcttgttacactactaccagactgctttcaagaaatatcggagcaaatgagtgcagcatccccaatacatggtgtttcccacatctccagcaacactgggttttattatttttagctttgtttgccaatgctgtggcaccaactagaaagtgcttccaaggtcatttacacttgcaatacttagtgagagttcttatactatagagtatgtggcagataacattttgatctacgaacctcaccctacttactcaccctttggtctgccctctgatataggcagccgcagggacgttcacacgcctcgcattagtgaagtgatgacactgcaaaatacagtaaaaggaatcaagctttcacttctgcattacaaaataggcttctggaaactcacagcagagaccatagttttaaggggggaagaagctttctgtatttcaaagcttggcttttgagcataagaagcctcaggcctgaaagactcaaggcatatggttcaggcataaataatagatttggaagaatatgtgatcagtcagagccagacagccctgccccaggctggataaggtttccctggactgaggcagtggagaggtagagaaggaagaagaggcttaaatggtgggtcctgaaggcagaaggctgcgacaggagcagcaagaggcagatggacgctgcatcccctacactgctcatgtccacgtggtacagtggagaaggctgtatgcaaatgccactcattcaggaggggttcctgcacagatgctgtcttgagcactgtggatatggcagtgaatgaaaaagaccaagtccttgcttctgcagaatgatgttctaatgggggaaatagacgtcaacaaacaaataaacaaatacgcaggcagacttcgctacagtgcgcctcacagacattgtgtattttacaaattgaaggtttgtggcaaccctgcatggatcacgtctgtctgggacatctttctgacagcatgtgctcacttcatgattctgtgtcaccttttggtaattctcgtaatactttgagctttttcattattattattgtgtctgttacagtgatctgtgatcagtgatctttgctgttactattataattgtttttgggtaccaccaacagcacccatacaagatggcaaacttaacagatgaatgttatgtgttctgactgtttggactccctatgccctgagacacacaaatattgaaattaggccaatgaatagccctacaatgggctctaagtgttcaagtgaaagtaaaagtcacacaactctcactttaaatcaaaagctgtaagtaattaaacagtgaggaagacacagtgaaagccaagacaggctgaaagcaaagcttcttgtgccagttagtcaagttgaaaatgcgaagaaaaagttcttgaagaaaattaaatgtgccactccagtgaacacacagatgataagaaagcgaaacagccttattactgatgtagagaaagttgtagttggtctggatagaagatccaaccagccacagcattcccttaaaccaaagcctaatccagaacaaggccctaagtctcttcaattctataaacactgagaggagaggacaggagaggagaggagaggagtggaggaggaggaggaggaggagaagaagaagaaggagaaggaggaagaggagaggaagaggagaggaagaggaaggaggaggaggagtaaagaaagaagaaagaagaaggaagaagaaaagaggaagagaagaggagttggaagctagcaaagtttggttcaggaggtttaaggaaaggagccatttccacaaacatcagcacttgaggtaaagcagcaagtgctgatggagaagctgcggcaagttatccagaagatctaaataagattattgatgaaggcagccacactaacagattttcaatgtagatgaaacatccttatgttggaagaagatgccatctaggactttcatagctagagaggataagtcaatgcctggcttcaaggcttcaaaggacagactgactctcgttagggtctaatgcagttggtgactttaagttgaagccaatgctcattttccattctgaaaatcctaggccccttaagaatgatgctaaatctactctccctgtgctctgtaaatgaagcaacaaagcctggctaatagcacatctgcttatagatggtttactgaacattttaatcccactgttgagacctactgctcagaaacaaacaaacaaacaaaaactctttcaaaatattactgctcattgaccatgcatctaagcacccaagagctctgatggagatatacaagaagattaatgtcattttcatgcctgctaacacaaaatctattctggggctcatggatcaaggagtaattttgaccttcaagttgtattatttaagaaatacattttataaggctatataggtgccatagtgattcctctgatggatctgggcaatgtgtgcaactcactttatcataatgtttgctttattgtggaggtctagaactaaacccacaatatctctgagacatgcatatatatatatacacacacgcatatatatatacacacatatatatacacacatatatatatgtgtgtgtgtgtgtgtgcctgtgtgtgatatatatatgtgtgtgtgtatggtgtatgcatatatgtatatgatgtcagtggtgataagtgctctgaagacaaataaaacaggacagagagtggtggatggtggaattattttaaataaggtggtcagagaaggcctttctaaaaacatgatatgtgagcagttgaagtgggaagggagccctgagcatatttgggcatagagcattccaagaagtaagaacagcgagtgcaaaggccgagacagaagtgtgtcttggcatctgccagacctataagaagaccagtgtggctggagcatgtgagacagagggaagaagacggtggaagggagaaagtcagagagacagcagatagacagtggatgggctgtctggacagacaggatggaggcagtcttggttaacacagggcctctctcctcctttcccagcatggtgtctaagtcccagaaggcactgaggggtcaaggcaattagagtagtgtgcccagggggacagtgtttggatgtggttgatggtcctcaaggcctccaccgcatcctcctggctccgcaccactagcctctatgttcactttccactccctacctctgggccttttctaagccacaagcagacagttggctttccccgtacctttgcttgcagggtgccgagcaaagttcggaggagaagttggttcctggatcctggcatccctttttcccctgctttgcatctgtgatggttaatattgtcaacttgattggattgagagatgcaaagtactgttcctgggtatgtctgtgagggtgttgccaaaggagattaacatctgagtcagtgggatgggaaaggcaaacccaccctcagtctgggtgggcaccatctaatcagctgccagcaaggctagaataaaacaggcaggagaagatggaagagcagatttgctgagtcttccagccttcatctttctcctgtgccggatgcttcttgcccccaaacatcagactccaagttcttcagcttttggattatgggacttacaccagtggtttgccaggggctctcgggcctttggccacagactgaaggctgcaccatcagcctgactgaaggctgcaccatcagcttccctacctttgaggttttgggactcagactgatccactgctggcttccttgctcctcaccttgcagacagcctttcataggactttaccatgtgatctcatgagttgattctccttaataaactccctttcagatatatgcatatatcctattagttctgtccctcaaaagaaccctgagtaatgcagcatccttgctcctacttaaggccacactactgctggcttggcccaccatcatgtatatgcaccagtttcaaaatccccacgccttccttgagctcaggaattcaggctgaagtcaactgattatgtgaagaagtaacatgtacattgaaatatgagttaaggccaggcatggtggctaatgcttgtaatcccaacactttaggagttcgaggcaggaggatcacttgaaaccaggagtatgagactagcctgggcaatatagcaggaccccttctcaaaaaaaaaaaaaaattgccaggtgtggtagcacatacctgtggtctcaacttctggggaggctgaggtgggagaatcactcgagtccagaaggttgaagctgcagtgagccatgattgtaccactgcactccagcctgggcaacagagtaagatcctgactctaaaaaaaataaaagaaagaaaagcaaggaatgaaagaaaacaaaagaaaagaaaagaaccctccatggaagttagttgctaagcaagataaatctctaggtgaacatggaagaggagtttttccttttagcagcttcttacctatttctccactctggcaggtgagcgcgcgcgcgcacacacacacacacacactcgcatgcacaccaacacacccctgcatgctccagaagcgcaaggatcaggaatctggtcccagctattgacagatggccactcctgttctaaatgaactgccggcctcggcctccctttcatctcaaaggccatttgccataacctcattcatctgtgcagactgtcaaattctctctcccagacttctcctgtgaccttcattttattctctgctcatgcctgagtgtggcagctgaactggattgattaaagttttagcactgtcttgttttaattcaagagctaaactgagcatttaaatgaactcgcagcaggactgattggcaggcttctggaatctgattaacattcctcctgaggcactcttaccctccttatctctgctctgtgtccgggttggtttctgggtgaaattcactgttggtttaaaatgacatcattggagcaagtgagagtagacgaatgttcacttccatccatccatccatcactggagaccctgggttcattaagcgtgtgccaggcacagtttccctctacatcccataattcatccatgggtctaatgaaccaagatggagtttgtcagtttgccccagtttgactagatgggacaattctttggtgctcagaatcttttatcctatagagagagactgtgaggggaagagagagcaactctcagcacagtgacataaatgtcagtgcacatccattcatcatttctacctacaaacacagtgcccacaagagccgggacactgaacccacaccctttcttctgcaggtcttggtctgattgctatttttcagggaatcacctggcctctccattcagttatcccactgtaattgcctgtggttgctaagacagaggaggaagcatgggaggacaggcctaggcatctatcacccagggctggatcaggcatataacttcataccatgccccctctaaactctcaagggccttctcatccatccatccatccatccatccatccatccactcacccatctgtccatctgtctgtccatccatccatccatctatccattcatatatttaattcagcaagtatttatcacttgccttctatgtaacaggtactgtgccagatgctgggattttttaaaaacatacccaggaggttgttcttattcagggatggtgtgttaggctgttcttgtattactataaaaaaaatacctgtgctgggtaaattataaagaaaagaggtttcattggctcacggttctgcagacagtacagaaatcatggcgcatactgcctgcttctggtgatggcctcaggaagcttctactcatggcagaaggtgaagagagagcaggcatctcacagggtgagaacacgagcaagagagcgagtggggaggtaccacactattttaaacaaccagatctcacatgaattcagagccagaactcactggtcaccaaggggatggcactaagctgttcatgaaggacccgccctcatgaccaaacacctccaccaggccccacctccaaccctggggattacatttcagcaggagatttgaaggggacaaatattcaaacaatatcatacggtaaggccagcagattaggagatgaccacaactgaaaagatagtttgttacttacggttcccaagagaaggggacacaccatgccacaccattcagagccacacagggaggcaccaggtcgagtcaggaggcaggagtgagggaaaagcatgggcaaagtctttccttcatttgtggttctcaagggaaggaacgggcgaggcagggtaagccactgagcaagtttaggattggataggctgaataacgtcagcaggctctgggctatcagggtggtccccagttgaatggtatctggccctagggtgattttgggcagaaggataacgtctagggtttcctaagcctgatgaaaggagccagtttggggaatggacttgggatgagttggtttgcatatcaaaggcatcttgcaggcaagttgtttgctacctgtaggaaatagccaaccctgggaagggtagtcccttcctgggtccacagggccccaagatgtcaaagcatcctaaaatacagaaaacgaaaacgtggttaatacatggggtttcagaaaatgatgtctgcccttaaagacttcacagacttcaaaacaaacaagagtttcatagcatatggcacaagctgtgccagtcacctttggggatgtctgcccagccacaaccttcccattcgtgggaaatacaccccagatctaaaggggtgggctcctcagtggccggccagctttatagtccatggcccatgcccctggcagtggctaattggaccaagatggacacatggtcccaagctcagccaatcagatttcctctcccactaatttgggattgcaattcagagaccggtacacctgtgctggcgggaacagcagctggtaaacacaggagccaggagacagtctgacttcaccgtatgtatatctgtgatctccaaccctgggtgcacagtggagtcactgagagtttttaagaaatactgaggccagagtcccaattcagaccacttcaatcagaatctctgaggatggggcccaggtgtccgagctcctgtcccaagcctgactcactcctcacacccacaaaagtgaactgtcctgggcctgcgtcccccctccaggagcatcacctctggccctgtcccttcatgctgtgtagaagtgacaggactgtgctatgattgttgtggatattccacacacacatagagtcatggagcacagcaacagggagggggcatgcttaaattaacacataacattcgtgcatttgcagggggtgcatatgatcttttgttgcatgtgcagaatgtgtaatgatcaagtcgggatatttagaatctccatcaccttgagcacttatcatttctacgtattgggaacatttcaagtctgctcctttagctattttgaaatatacaattcattgttattaattacaatcaccctactctgctattgcacattagaaattattccttctgtctaactgcacatttgtacccattaaccactctcttcatcccctcctcccccacatacacacaaacacttcccagcctctgataactataattctacttcctaccagagggagcatttttttacccagactggagtgcagtggcactttcttagctcattgcagcctccaactcctggggctaagcaatgctccagcctcagcctcctgagtagctaggactacaggctcaagccaccatatccagctaactttttttaaaaatgtttttgtagagacatggtctcaatatgttgcccaggctggtctcaaactcctggcctgaaagccatcttctgtatttgtccattttcacactgctgataaagacatccccaagactgggaaggaaaagaggtttaattggccttacagtttcacatggctggggaggcctcagaatcatggcaggaggcaaaaggtaattcttacatggcaatggcaagagaaaacgaggaggaagcaaaagtggaaacccctgataaacccatcagatctcatgagacgtattcactatcatgagaatagcataggaaagaccagccccatgattcagttacctccccctgggtccctcccacaacatgtgggaattctgggagatacaattcaagttgagatttggtggggacacagccaaaccatatcagcctcccaaagtgctgggattacaagtgtgagccactgtgcctggtccagggggagcgtgttaaatcagtctcccactcaacttctgataaaatgaatgtccatcaaaagaagatgtgcagtgcacccaagaagtcaatacatcaattaaccaagaaatatttttaggaagagagatgaataagaggaaagacaaggttcctggcctgggggagcgtttagttcagctggagagggctttagatgttgatgtagatatgtacacatataaatatgaatgcacgtggcagtctacttgattaacattagtaaaccaagcatgatacacactggaagaacggcactccatgcgatcagaaaggaaagattcctctgggctgggctagtccaggaagacttcctgaaggtgggggcatttaacctggtcttgtgaagaaaggtgagtttcaaacaggcctatgggccagggtaaccagctctgtaggtgcttgaaggacagccatcctctgcacttggtgtgcagaacaggccccatcagaaggcgttctcagccacagcctcaggctgtgtcctcctccttccccacagagttaattttttatcactcaagcaaaccagagaaactcaaaagcttgaactaataatggtggcccaagtccaagcatgggtacggacccaggtgaggtcctctaacctctcagaaagcaggtatcaggagacaaagggggtgattgggtaactaggggagacaggagacctggactcacccctgcacagatgctacctttcaaagacacaggtgcatcaaacactggaacccagatccactcacagtcaaactctgccccttctttaaaatagctgctctagggagacagagatggagaagagctttgcactcactgctcactcttcccaggagctaagcctaaatactgagggcctggactaagaataaaacttagtcatggctggacgtggtgactcacacctgtaatcgtagcactttgggagaccaaagtgaggggaccgcttgaggccaggagttcgagaccagcctgggcagtatagcgaaacgctgtctctacaaaaaataaaaattcaaaaattagccaggtgtggtagtgcactactggagtctcagatatttgggaggctgaggtgggaggattgcttgagcccaggaggtcaaggttgcagcgagtcatggtagctctgctgtactccagcctgggcaacagagtgagaccctgtctcttaaaaataaaataaaataaaacccagtcattccaaagcaaatgtctttcctctatttccatattcacaaatccctccccagctctagaggaactagccaccccgtgagccgtcttccctctgagtctcttcttctttccctcggctgatcccttcatcctcccattctgcctctctccatctccctatcaggaccccttattcctcagctgcaatcaactcccaagtattcggcctgcaattcctgaacttccacctggcactgctaagctttcaaacccacaacctcgggtctgagtttcaggccaggagtgtccctttctcctgccctttgggggagctcggatttctacccatccacttttaaaacatcccttccctctactcagtttgagaataacatctggggacagatgtgtctgaatcatcccgacttggggcttggtttccccctctgtgcaatagagagtggactgtgccctctctctaaggatgaccgtccgcacacaccccatcctgagtatgagctttttccaggacggcagtttattttcagctgtaggctttcagcgacactggctttgcttctttctgctgccgtgaaagattttccatgccactagggagtataaatgctcctcacatgcatttttgaaagacctcggaaacctctgcataaatcagtagaagttcatttatggtttcagaatattctggctaatttatctggtgtcaaagatcctgagcctgagccttcagtttccaaactgggccctgtagggctctgctgcatttcccttgcatgtttgttttggctggccctgaaattcgacccggccacaaggagacctttatcattatccaaagagatcttccccttcccaatgacacactgttcggaggtttaactccgagccagtgcttcttccccttttaaaaaaccaacagcaaagatagagctcttccttccaagccaccaggtcgcaggtctcagatttcagccttgccctgatgtccttcctgtgagtttgaactccgctgtgccagcatgtaggccctcccaacaccctcctgctggccttacgcgggccagggcaggcagtgtacagaaacagggacccactgatggtgatgcaatgaaaaaaaataacctggcagtcagcatgtttgagctttctggggctgtcttaccagaaatcgctgtagaaacatgtggctgacattgttagcaattagcccagtgtccagccccagaggcgattttacatccttcctggctatggtttgagatttcattgtttgatgctccctgcattttgctctctcagtatttcctctaccctgaatcatgtggccaagccttaaactcctgtcctttgaggacaatcagaatgacacctttagtgtttgtgccttattttatggcctcatgatcttgtgccctttggagttcaaaggtcacatcaggcagcaggccgggaggtttttgatgtgacctttgaaccccagaaaacaaaagaatggaggcccacagagaccatccatctaaaaaatgatcctataaagaatgcaactcaatcagcccagagcatgcaaatcacataacatttttatggagcaccctgctaaatccaaacttacagccagaagaagggacacaaaccccatgatcccaatacataaatcaaagcttgagaaaagcaaagacatgagtttacagctggctaagaatggaaggatttgcaaaatgtgatttatacatttgtttcctcccctcctcccacccagtctacacacaaacacacactcacacacacgctggtcaataccacagcaccacagggaaatccagcattttcctttccaaaggtttgccctgtgctaagtctaccatggacagacatgggagagcaactgaaggccaagagcttcctccctggccaccagaaccatcctcagagacaggcagaaagtccatagggcaggcagccagataaggaagatgaggacttgccatacaggtaaaaggctggccccacaaagaaggccacattctgtagaacagatgtcacctcccctatgacacagattgtccctcaacagtccttaatacctggcacacatgtccccagggcaaaggtcagactaatttctgaattgatgagaaatactgttcaaatagttagagactgagcaggaggtgctcctgtttctcatgactattgaagttttggttttttaaaaaagaaatatttaagtgtgtttctagatgtctagataacatgctgatgctgggtaatagatcttgagaagtctgccaagtatgtctgtagtagcaaatgttcagagaccagaaccgtggagtatgaaaaagagatccccttttaaatgaagattggatttgcaattaaaatgcgtgtcttctttcttttcttttccatttttttttttgtttgttttttgtttgtttgtttgttttttaagacgagatctcactgtgtcacttaggctggagtatagtggcacaatcacggctcactgcagccccgacctcctgggctcatgtagtcctcctgcctcagcctcccaagtagctgggaccacaggtgcatgccaccacatccagctattctttttaatttttttgtagcaatgaggtcttactttgttgcccaggctagtcccgaactcctggcctgaagtgaccctcttgcctcagcctcccaaagtgctgggattacaggtgtgagccactgtgcccggcctttgtgtcttctacagtgaaactgaaaaattgtgtaggtgcatctagatcttcatcatggatgttgcatctggaagaatctctgctctatctcatccaggttcctcctttctttttaactttgcaccagattctaatgtctctgggagctatgaatatatttttaactctgtctgaacagtaccacagctgtgtctaataaaactatgccttcaacagtggcaccccaaagcaatttcagatgaaataagaatcctagaaaggaccctagaaagaaaaaatcctggccttagaattggaagactaactctgtatgaccatggtcaagtcgcttcacctctttgagcccccatttctgaaagttgaatggtcctggtgctttctgagggcctgctctgcacaggtcctgcccaggtgtcgggataacctctatcctgtcagatttaacactgcatgacttctctgtttccaggacgtcttacttagacacaaaagaatgaactaaacagctcctcctctacccccgttctttaactcggggatttcaccacctgtttcctacttaggagaggcaaaatgtaacccagtggacgaagccccattttccaaatgattcctaagcagcaaacatgatgttgaagtgttctgcaaaattctccatgcaattttggaagcccagtctaaggaatatatatgactgctgcttaagctgctcaaaaataagtttaaccagggtctcagagtctttctggcccaagactattgtggctggaaagactaggaaatcatcctggctaatctcgacctctttacacattccacacgtgctctggacaggggctaggggacactcaccagaggtcacagggctaattaggcacagtcaggaccaaagctcaagctcctccagcgccggcgcacactaacagctaccccagtgcacactgggccgtggcactggcttcttacccatctctacaacaaaactgtgggtagatgttactattgcatgtcagagatgaggtgctagagtcctgggaggttcagttacttgcttaaatctcacagctgatacatgaggagccgggattgggctcaggctttgtctgattccgggcctgtacttgtaagcacccacctcagccctgagaccccatctctatgccacagcgtgaagcctcacacacaggagatgatgagtccacagaacctgagtgggaacagtctcagaggaagggaagaagggggcatgcagtgagtttaatggtgcccccctaagagatcctaacacatcctaacccccacaacctctgaatgggacctgttttggagaaggcaactttgcagatgtaattagtttaagtatatcttgaagagatcatcgggattatccaggtgagtcctaacccaaatgacaagcatccttacaaaaaacagaggaggagccgggcacagtggttcacacctgtaatcccagctacttgagaggccaaggtgggaagatcgcttgagcccaggagtgcaaggctgcagtcagctatgataaaaatttaaaaataaaataaaaataaaatcagaagagaagacacagacacaggagagaaggccatgtgaagatggaggcagagatggagccatgcagccacaagccaaagtatgcctggagccacaagaagctggaagacccaaggaagattctttcctggccctgctgatgccttgactttaggctttctgggctccagcattgtgagagaataaatatctcttgttcaagctttgtaggcccgcatagcatgagagtcgttgggtacttaggcttctgaggccaaggcattaggttctgcagaactgaaatctccacactttggtaagaatgggcgctgaatagccccctggcaagtcagccccagccccagctgtgctctttaccattacagagctcctaagaacagaaggccttttgcccattggaacccagttccttactcttagtaagatttggcaattgagccaagacatattctagcctgagtcaaatatctagattgataaattgtccaagtcaggtgtgtgttggggaaagattcttcaatgaaggtttcttgtagatcctaaccctcccaaatacatgttcaatgcaattagatttttaaaacttccatgatatggttaggctttggtcccctcccaaatctcatcttgaattgtaatccccataatccccacagtccccatgtgtcaagggacagaccaggtgaaggtaattgaatcatgggggcagtttcccccatgctgttctcatgatagtgaatgagctgtcattcactatcacgtgaatggctggagatgacctgcttgggagctcaggccacctcaggccacacctggctacactccaggctgaagaaactgataagttccaagcaaaccgaggaaactccccaagcacaagagtcaggagctcttcccccttcacttggcacttctccttcctgccatcttgtgaagaaggtgccttccttccacttcaccttatggcatgattgtaagtttcctgaggtctccccagccatgtcgaactgtgagtcaattaaacctctttcctttataaattacccagtctcaagcagttctttatagcagtatgaaaagagactaatgcattccatttcaatggacattttcagaaacacacttctatgtaaagcaagttccgtagtgcagacttcctgcttgttcccaatgggtccttgggttataagactacaaagacagaggtggctgggcttctttattgaaacttgctggctctgagacagaacattccagcaggcagacaggagatgaggatgcttcatcacttcagcactgatggactgaatgcttcttctctggatcactgtatcctagaagcccagtctgaggatgtgaatagcaacatctacccacagctttattgtaaagatgaatagagttgatgtgtaaaaagccagttctctggactggcgtgcacacacatggaagtagccattattacaggctgggaatggaggaacatgtgcttcagtcttgactgttcctaattagccgtgtgtacctacttttctcatctataaactagaacgagcatctgccctaactaaggggcagattttgagggaatggcacagactacttctcaggctgtaaaatggggacatgaatgtttttaattgtcatccttgacacatgattccagtgttttcaaatattttcctggtaaaacagaggtcagatcctcctttgctcatgctgctgtcagaagcccagacagcactgttctggtggccagagatgacctgcttgggagctcaggccacctcaggccacacctggctacactccaggctgaagaaactggtaagttccaaacacaccgaggaacctgcccaagcacgagagtcaggagctctgcgttacatatgtcatattttttctatctagcccatatttaataaacccaattttttaaaaaagtaattgagtctcaatcctcagaagcaaatcttggaaatatggaaatatttgaagacgcctccaaagtagataaaagaaaaatggagggtttcaaaaatagcagcttatgcaagatttttgataaaatgaaatccccataatataaaattccccataatataaaattccagaatacatagtaagacctctgacaaggaatagagtcagacactgcttccacctatgaatcatgccaagaaataactacctctcattgggtgttgaaaaatccttgtaaatatatagtttggaagaaatataaaagccgtactttcctctgatttcagaataaagactcttcctccatcctctgactcccacaaacttcgggtgcacacacatgcacgtgtgcttacacacgcacacacaaacatacacacacacacacacacaaaatgaaccaagaaaggaaggaaaagagatcaggaatgagagagcccactaatggattggcttaagtatagaacaacatcccatcactgttctagaaaataatcaatcgagcacttaattttaaacataaaagtaagctgccaggagactgttaatagataaccaaatgaattaacagttgtaggtgggatttgaaaccaggtcagattttccaccaagctccaggccctatgcatacaaagggcctcaccagctcgggcacttgatctcacactgtttcaaagtgggatatctccttttagccaatatccctcctcagcgggcttgtcacttcaggggattgttctttgtgcatcttccataaattttataacaccactactttaaaatattgatgggcaacttggccttggcccaggcccacagtgggttagcatggacatgaaaaccttcaggagggcagaaacaggaagaacacattccccgctgccttttcgtaagggacaattgtgtaagtgcggtggttacctgagctggagacctgcccagctttgatggatggctctgccctctgggaggctgctgagagctgtttggggacaggagggcactcaggacacacacaggcaatactgaggtacctatagacctgcaaagggtaagtaaaatccacacataatcccccaagttgttctaacctgaaactcaactttcttaacactcagactttttgcaaagttattgataaataagaaaaaatggctttgtcatgtgtctcttcttcctatgcccatcaatcccattcttcctataaccctatcaaggcaagtgaccaaaaagtaaatggtagcaaggaacagaaagagcaggacaggccgggtgtggtggcttacacttgtaatccaagcactttgggaagctgaggtgggaggatctcctgagcccaggagtttgagtccagtctgggcaacatagggagacatcatctctacagactcacacacacagaattagctggccatggtggtgcatctgtagtcccagtgatgtggtttggatttatgtccctacccaaatctcgtgtagaattggaggaggggcatggtggaaggtaattggataatgggggcagatttaaccttggtgatctcgtgatagtgagtcctcataagatctgatggtttaaaagtatatggcacttctctctcattctctctctcctgccaccatgtgaagaaggtctttgcttctccttcgccttctgctgtgattctaagtttcctgaggccttccagtcatgcttcctgttaagcccgcagaaactgcaagtcaattagacttcttttgactttgactacccagtctcaagtagttctttatagcagtgtgaaaaccaacttatacacctagctacttgggaagctgaggcaggaggatcacttaagcccaggaggtcaaggttgcagagagccaggattgtgtcactgcattccagcctgagtgacagagcaagaccttgtctcaaaaaacaaaaacaaaacaggacaagagaactgatcccctagattcctgccatcacactctcttcataatactcccagaaaaaaactataacaccactaagaacaatacagcaatagtgtgctaaccaaattaatacaagttaataatgactaccatttattgggccttcaacacacatacacacactcatgcacacacatatatctcagacactgcactgtactaaacacattacatatgtgatctcatttcatcctttaaaaaaaaatctgcaagaatagcctttgactcagacaacacacttccaagaacttttcctatggaaatgatcaaggatatgtccaaagattttgtctataaggatatttgtcaaaatcattgtttagtaatatgtcatgacaaataagacatgtccatgagatgttaaatgagcaatacagagtatagaagaaacatatgagtatttttataattttaaagtatgcataaaatatgtggggttagtttcatcaaagtgtcataagttcatgcgtaatttccccttttttatgtatcttactttccacattttaaaataaattttagtaagaaaaatatattttaaaattatgacctaggtgctatgtccaaatattcataggtgttaatgaataatagcccactacagatacaaagccctttctagtctacattctggttttacatgttgtctcagatgattctcacaccatcttttcaggtgggcagagcagatggcttataatgctaaagatttttaagcatacaaaaaataattaaaaggctgggtgcagtgtctcatgcctgtaatcccagcactttgggagacagagacaggaggatcacttgaggccaggagttcgagaccagcctgggtaacatagcgagaccccatctctacaaaaagaaaatttaaaaattagcctggtgtggtggcatgcacctgtagtcccagcaactcaggaaactgaagcaggaggagcccaagagttctaggctgcagtgagttaagttatgatggcaccactgcacaccagcctgggcaacaaaaggagaccccatctgttaaaaaaaaaaaaaaaaagagagagagtaacacatcaaaccaacagcctttccctgtgacccacaggcaggcacactcaggcctctctgaaaagaggctgcccttggctgtggtccacggggtgtctgctccaggctcccaatgttcattgtgggggtgctccaactgccgtgaaaataatctgacttatcactccttgggctccccatactcccattacttcttaggttctgtaggattctgctctgttcactgcaggaagggagcaaggtgggggaacattccagaatacatagtaagacctctgacaagggatagagtcagcaatgtgcaggagctggctcatgctggctcaggaaagccaatctttaacaactcctcccaactctatgatcagtaatgccacgttggtagcttggagccagcagcagtggtagtatttacaccatgaaaatcagcaaatgctacaaatcagggttcctttttctcccagagagcccgttgttaaacgtttatcagcacaccactggatgcagtctcagaaagaaaaattcgtatattcaaatgaaggttaatccctccagacccctgctttaattaagcaggactacagctccacagactaagcagactgtgaaggttgttttaaaataacatattattcagaaaactgtttatgtatttacaaaccttgccaatttgcccactctccatccctccttgaggtctcttgtttccttttgctgtgtttcccccagagtcaaagaaagcccacctaatacagttcttttgtttataaacttgatggacccaaacaatgtttgaaacagcccagctctgagcagggacagaagaatgtcctgctcaccacggcagtgcccagtcttgccccgaagtcagacttcgctgagccgaaagccttgataacgtgtttgcccctgtcctccggcttcccagtcgttgggccgtcttcactggtgcttcctgaacaatctctacgctgcacttgaggacgactcagctgggagtgaaacatgatcaggagataatttggcccagatggctctaatgcaggcaggagcatttggctgtgcatatccttagtctaggggaacccatttaaatttttttgagaagggaatgtaaccaagcagccacacagcctcaaaatgctacctcatgttatacagctgcaatgagatgtctgatcacgctcctggagagacattcggctcttaggaaggtaaagccaggctagcctttgctgctggataccaccacggctcggctcggtacttggcctttgggggattcagaagggatcaggcataaaaccttgaatatattcctagctcctgaggatcaagggattgcagcaaagggtaataccgcaactggaaacaggagaaagcatcgcagaaacacagagtgaaccaggagttcggaagaggcccagggagaggcttgcgggacacaaaacggtgaagtggctgcacagagcagctgtctttatttctgtcgagctctgaggcataggaaggggttagaattcactatttgacacagttttccttttctgtcatgcaattgacaggagaaagatacaaataaaagaagctgcttgtctgcagagtgtagcttcgggaaaagattagtttgcttcaggaaaaataggacccatgcaacccgaggctctagagtatgacggggacacattggtgacagagtctcaccagtgttagtgaaaaggtcggctgccttcaggagccagctggagctctacagctgtgcacacagggttccatctcattctctccagcgtagtcatggacactttaacgtggagccctcccagaggaacagacgggaagagaccactttgttccccactgcctaatcttgagaatgagcaattcatgctcccctaaagtgggtccttacccactgctgcgttggtcttcccctgtgacaagttttcagggccggatgaggtgacaagtaaaacaaaatgtacttttcagacagacctttgtcatcggaaagcttttgtcccttttagccctctggctgaaactgttgattgggaatcactttccatggattctgttagtactacaggcccatgggtttttggtggagacaaatggaatcttactaaaaagacttatacccctagtcactgtgggggtaacttttgctccaaataggcagtgattatagagagagctgcctctctatgtcgtgaatgtggagaataatacaagtatgcaatccatagatatcatttccaccatcccagaaaagttcccttttaggcagcagtgtgctggtaaatggtgactaaccagcaatctgaaaaacagtctatgcatataatgtaggtgtgagagtatgtttactataaattttactaatctaaaagatgtggaatacacaatttacaaataataataaaatacacaatacactttcctacaaattccatatagtcaattcattctcagagaatgcttttgttgatgtttaccaagctctcgcatctgcagccaacctatggttgcaattgatcaacaagtatagttcacacatatcgacattttgtttacattcatgagcaatgcaaatatgaaacaacttctttgtatgccaatacttcacttggataagttgaataatagttttcaaataatggaagactattcaagtgttcaagtgtttgtgaaaatcacagtgtaatggctacagaaacaacttatgtactgtgttattaacgtttttcccatcactttcttaagtctaaataatcaacgacaaaaaaaagggcgaaataattagaaagtaatgaatttagaatgttacctttgtttttaatataacttaatttgaaagatattattttaatgattaacttgaaattttaacaattggttcacaagccaacatgccatgtgcctgtgcaatcaattccatgccatatatacactttttttcagataaggaaaaggtaaaaatacagaatactacatggattatcaaggttaaatctattctttcttaacatgacaggaaagtaaagctttgacccgcaggggagactggagaggggaagttggcctgtctgttcccatttcaggagcaggctaagagtgtgtttctggaaacaaaactgtcagagtgaaggctcacaagaaatcagaaacaggacccagatctctacccaagggcttataacaaaggctcaaagcaggcttttttccaaaaatgtttttaattccaacatccatcttaatggcctactgtagcctaatttagccaatagctgttattctaaaaatggaagctaatgattccagctaaaaacaacgaagccggtactatcacagtatgttgtaagaaactgattatcatggggtgcatttttcacttccttttctctgaagaaaggcttagtaagagtcccacatcaaaagcaaaagcatttctttctctcacgggaccccagaataggaggaatgtgttctctagaggcaaccacctcccagaactactctttggcaagatgcatcagacgcacggagcgatggtctggctgaagggcaccacctgctattgctcatcatattcgtgccattcaacaaatattagcagcatcaatttacttctctgaagcacctgcaggtacccaccacttggctgagtgctatatagctctacacactttatattttgcaaaatacgtgcatatggaaaagaagcacaacatttaaggcaaagatcagataatagccgtattgcacaagtgtctagctggagaaaattgacaaaaaaaatagaaagtttgtaaaatgatcaaaattttagatatgcaggataaatatgttctggggatctaacatacagcatggcgaatgtagttaataatacttcaagtactgtagacagttgtccttctatattggcagggaattggttccaggatcccccacagatactaaaagttatccacactcaggtctccattttgctattaaaaattgagaagctgaataatcttaatttagggcattagtttccgggtgagctcagaattttcttattccagcttgtgacatctcaatgaatttcccatttccacctaacgttaggagccctgttcctgggccaccttcaggattctggcagaaggggtttcaggtgaggtgagaaggttaagaggtgaattggaggttcttggctgatgcacctgtgccttcacgtgcccccgtgcgcacacatagacgttcgcttacagctgccagctttaaattctgccttcccgctgtcgttgggcaaggtggtcctttgccgcatcgacaggagctcatacggcagagcccctaggaatgcaggtgcccccagtcatctacactctgagcagggggcaggtcttgctgctcactccacttggggtatggctgcagcctaatctctcaccctttgtgggtaataataatatactttggataagcacaatggcatcacattgagcaaaggatctcttttacatgccttaagttatggtttcttgaattaaatatggaatttactagaaagattagcccacctcttgcatcagcgtgacctggaggtgagacatggagtcaaaggagattattccggaactttaagatttattgagtaggccggggatggtggctcacgcctgtaatcccaacactttcagaggctgaggcgggtggatcacgaggtcaggaattagagaccagcctgaccaacatggtcaggccccatctctactaaaaatacaaaaattagccgggcatggtggcacacgcctgagtagcccagctactccggaggctgaggcaggatgatcctttgaacccaagaggcggaggttgcagtgagccgagatcgtgccactgtactccagcttgggcaacagagcgagactccatctcaaaaaaaaaaaaaaaaaatttaaggagtgccctgccgggtttcagacttgcacagtggagtgcagtggtgcatggggcctgtagcccctgtgttttggccaatttctcccatttggaatgggaacatttaccaatgtctgtactcccattgtatcttggaagtcactaacttgcttttaatgttacaggctcacaggcagaagggacttgccttgtcttggatgagactttgaacttggacttttgggttaatgctggaatgagttaagactctggaggactgttgtgaaggcatgattggttttgaaatgtaaaaaggacatgtgatttgggaggggccagggtggaatgatatgatttggctctgttccccacccaaatctcatttcaaattgtaatccccataatccccacgtgttgagggagggacctggtggaaggagattggaacatggagacagttcccccatgctgttcttgtgacagccagttctcacgagatctgatggttttataagggggctcttcccctttgcttgctctcactcactgccatgtaagacatctgcttccccttctgccatgattgtcaatttcctaaggcttcctcagaaagccgaaccgagtcaattaaacctctttcctttgtaaatgacccagtctctgtatttcttttcttttttttggttttgggacagggtcttcctctgtcacccaggctggagtgcagtggtgcaatcacacctcactgcaacctcaaactgctgggctcaagcaatcctaccacctcagcctcctaagtagctggaactacaggcatgtgacactacacccagttaatttttactttattttttgtagagtcagggtctccctatgttgcccaggctggtcttgaactcttgggatcaagcaatcctccaaccttggccttccaaagtattggaattacacatgtaaggcacggcacccagcctcacatttaaagggcttttaataatgagttcagggccaggtgcagaggctcatccttgtaatcccagcactttgggagactgaggcaggagaatcccttgagcccaggagttcaagaccagcctggacaacatggcaaaaccccatctctacaaaaaatataaaaaagtagcccagcgtggtgaagcactcctgtagtcccagctacttggaggctgaggtgggaggatcacttgagcccaggaggtggaagtagcagtgagccgagatcgcaccactgccctccagcctgggtgacatagcaagactccatcttaaaaaaaaaaaaaaacaaaacaaaacaatgagttcatttctcctgatacgaagcaaattttgagtgcaaaaatttattgtgatttttaaaaagttaagtagttcaagaatgcatattctttagaagagcactatacatgcagggacctgggctttatcatcaccctggcaagctaaactgcctcatcaacactgtccctgcaaaagtttctgtagaagttgattcatcaattaaaagccagatccgtatatacacagctgaagaaactgccagcagttcattgctaattaccagggcaaacatttgtatttcaaagttgaccaacaggatgacaattctcaaagctctaaaaagattttgtcctaccaaacactagcctaatgtatgaccgttacccatccgtggttagtaacaatcaaaggcaacacttcttacagcaacaaatgccatgagcagtgatctcaataaattcctctttgcctgtcactataaaagccagtctggtcccaactcagtatcaaggacattattccagacagcacagtactgctatcaattcaggtttccttagcaaataagtgcttcagatatactcgcaagggctcctgaattggagttttctgcatcatctccataaaaatattttttcacctctaaagtcatcaaagaattgaagcaggcccttgggaaatatccttaaggggagagagtggctccaaaaataaccttccttccagcaccacaccaccagctcagagaattcacttcacggtgggacggtcactcaaagtctactgtgaacctcatccccaaaaaggtaatggcaaaggctagaggaaaatcctaaacaatcacctatgccttgtatctttctctagaaacacaatctactagtagaaaaaccaatttgaaattttaaaaatgtggatgctactcatgagggctgtcatcaacgtaggaaaactattaactcaagtggatgacatgtttcttttcctgtattaaaaaagctcctcacatttaataattctgatttagatcagttttgatttaacagacagcatgaatcaaacttagctaaaaccttaatgatgttgtaatatttattaacatagccaattctcaatatagaagatttatgaatctcctaatacttccactttataaactggctaaaaaaaaaaaaaaaaagaaacgctcttttgaagaacaaagtttcagggcttggaggaaagagaaagtgatctttacaaattcttcatggaaccaccggggatcttttaatccatttaaatacaaacatagaagatcagactctgatctgacattatttctatatttttagaaacacttttcactcataaatccaaggtgacaatggcattaaatggcattaaaaatatctacaggaaaggactaccacgaaatacaatattatgataacagttattgcattaaagtggttacttttctgtattcttcacatgtcccattgtatcactatacatttttataataaaaaatcgtaaattaagaaagaattcaagcaaagtattgttgactttataaaataattcttaaaacaaatgttcagaaagaaggcattcaactaagatagagaagatgctggatggagaggcttgcaaggtcccgggaggagctccagggtgaagctcatcactagcctttccagcagcactgtccctggagaccagaagcagtgggagccccttccctgtggcaccacggactcccaccaaggcacgtatcatgaacactgtacttgtacacgtttattacccttgggtgtatggggaatctaagagcacctctgaaatccatacttgattcctttttacattgaggaaagtgagattcacacacaaataccaagatgaccaatgaatggtggcctcgctggcaaaagcagccattgcaggtaaccaaattgcctccctagcattctgtaacccatgggcttagggaaagattaagtaacatttctttttcaaattcacttcaaatactcaactgtgttcatttaaaaaacagcaactatatgcacgagactaaacagatctcattcacactgccagcccacagaggggactctccgtaccctttcaggagggttttgggcaataaagccaaaatctgtacttaaataggtgtgtctcataagacaaatttttaactcatttattaaaggtcctgatggacattccaaactagtaacttatacctagagagagaaaatacaaatgcttactgtatagttatataaaaatagaaatccatcaagagtccaatcctcaagaaaccacacaatttgtacccaaaggctgtatatatatcaaggaaggatgacttccttccttgatctctaaataacaccctctccacatcggaggtatctggaggttgggcatttgcctaacgccacggggtccaccggcgggggtcacagctgctggctggtgaagaaggatttagtctccctgcagacaggattgacacagagcggacagctcagggtcagctgcttggaacacagctcgtttgactggatgtgtgaatgcaccaagtcggccagggcctggaagatagacaagaggcaaagacgcatgagaagcacagggtctgctcgtctgccatgccccctcctccagctgcccaggtcagcgctctggcttggggtttcttttcatccgagtggtgagccctttgaaccaaattctacagcatcttcctttcctgagaatcctcagcttacagaaagttaaaacagagatttcaggagatgaaaacctcttaccctacccactaggccttttctctggaaagcaggttttaaatcagacatagttataggtgggtagaaatcagaaaattggggctatctgaaggaaaaaagactgagcagataaggaattcgattttatttttgtaattaattggaactccaaatgttctaatatgtgagaaaaaccaatattctgcaagagtttctcagaggattactctctggtatgttctactaaaacgattgtaacactgtagataccttagagaacaatggatttccattaagagactcagctcttctgatgttttcaactccacactgaatcaaatgagaaaagggaggaaaaacacagatatattttattttcctttttttttcaaagaaactgctacaaaaaaataaatacacacagatacacacacacaattcaaagtctgacttcaactgttcgcagactgctcattaatgaaaaatactcatggggcagggctgtatgttgattctgttatcataaattattcctcaattcttatgtccttccccttccccattaccttcctaaaggtggtttgtttgcaaatcctttttgtggttacacttgatgaaattctcaagcaatttaaatctgtttaccattctttttttattctcttttgctagtgcataattttacagactcttcctaagtagaatgttactgtaaatatagtttcatacttgttttgatcccaagtgccaaaatgaggtaaattaacttatcgactataaaatatgtattggacctacactggaaccaattcagagttgggttttaaaatatattcttttttcttttttttttttttgagatggagtcttgctctgtcacccaggctggagtgcagtggcgcaatctcggctcactgcaacctctgcgtcccgggttcaagggatcatcctgcctcagcctctcaagtagctgagattacaggcatgcaccaccatgcccagctaatttttgtatttttggtagtggcaaggtttcaccatgttggccaggctggtctcgaactcctgacctcaaacgatccacccgcctcagcctcccgaagtgctgggattacaggtgtgagccaccaagtctggcctgaaatatattcttatggagaaaaatctaaaggaaaacaatgggaggattgtttctgtaccatccctgctcccggctccaaaaatatccactgcctaataactgaaaatggtctaattatgatttactcaggtagttaggattcttctctttcccttttcttttgatagcttttcaattacttgatcttttattttttatttattttattttatttatttatttatttattttttgagaggcagtctcagtctgttgcccaggctggagtgcagtagtgcgatctcaactcattgcaacctccacctcccagattcaagtgattttcctgcctcaggctcccaagtagctgggattacaggcacgtaccaccacgcttagctaagttttgtattttagtagagatggggtttcaccatgttggccaggctggactcaaactcctgacctcaggtgatccacctgcctcggattcccaaagtgctgagattacaggtgtgaaccaccacacctggcctcagctacttgatcttttagattagcattaacatcaggagactggcatgggaaaaacgttgagattcagcaaacacatggatctcaactgaagaggctgtattctcaaacttcatataaaagtcagttacaacagaataaccagcgttggtaaagggcattctccaacaatgttgatgggagagtcagcgatacactgactagaaaaatatataccaacactgaaattccatgtgcacctgtagtcccagctactcaggtagctgaggagaggatcacctgagcctgggattttgaggctaaagggagctatgattgtgccactgcaccccagcctggttgacagagccagatttcatctctaagcaaatttataaaatcataataaatttaaaataaaaaaattgatttccaaacatattggtataaactatattttcactgaagttttagcaagttcacaattagccaagctcatagtgagatacagaaggcatctttaaacaaaatccatagacaatgctgcaaccatttcttagccaattacaacttgcctgcaaatcctgtgtcagaaccactgacaagaaacttaggtgctccctaacttcacccatgtctgattgatgtccagcatggaaattcaaattccacggggatcaggtgttggctcaagttctgcccccacccactctctaccctgccctacacctgctgcccagtcccagagagggtgaagtctcctgcaggatggtcctccatctatcatacttggggtgaccagggccagaaactctggcagagagggaggaaagggtttcttgggtcccaacgcttccacacttcccataaaaataaagctatatattggaataggttttaggctggctctcaaaagccaggacatagatgaacaatagtttttctcctccctgaatgacaattcacatctatctcatattacaagacaccaaagatggtatttgttatttcaataatcagattgatcacaacataacagcaaacagctaattaagtgagtgcataaaagaggtcaaggaaatcacatcacacattgcttccatgttcatttcacgctcttcttttaaatgacaatgactcctatatgccttgacactcaacaagaagccatgtaataatagccctgagtaaaggtcatgattaggcaaagaaaagaaattataaaacaataaaatgttttcctttggaattagtgagaagtacatttcttttttcttaaagaaatatagttgttattactttcgagtagcccagtaactcaaactaaacaaaatgatgtcagccacagtgatccctggggcacctggtttaaggaaagcacaggtttcccctcccactgcatggaattaactcaatgtgttgagattattactcagatgaagtattattcaggagaatgaggacaccgtacatgcaaacaaatacagtaaacaatatttctgaatgatacattagttagttgcagaaaaaatttccttttaaaacaagtcatgatgggaaaaaggcagatgggtgcatttacctccttggctaaaacttgagagtactcgatgtccagctcatacagcgtttcaatatggtcactggtaaatgctatcggaaccaagaggatattcttcctccccctctcacaaagccctttgatagattcgtctgtttgaggacccaaccagggcattggaccaacctatgcgaaagatagacgaatgcgtaagtggactatgcctcctgacggtctgtagtacccctgtttgcccccctgggcacacgcactgcccactgcgggcaagagccactctttacacctgcttgaatggattttgatattttcacatggaaacttgaatcctagaagttgcctcaatataaataaataacagtttctgtcattgcagctaaaggtaaaatattaaaccaatggagctccacgagtcacttgatttccccttctatcttactcgcttgcagagttctttctgcccatggtgagcaatcaggttatggaagagcctgaccatgtgtaagagccaaatctaaccattttataactcataaaataaattttaccaataagagctggccgcccgccagtgtggaagccacttaccttggattgccacaccagtcggtaggggttgcagtactccagcctttccatgactttttggacagtggcgcttacctcctgaggatatgggtcgcctctgttgaccacctgcagcagagacacaatgggtgttcagccattaacactgggaaggccccgagagcctctgactatgtgctgacacagtgtgagccctggaacaaagccctccctttctgtctcctgcaccaatgatgatatggtctgagttcaatcaccaaacttccttagttccacttcttcatcagccaaagaaaaacaccgcagtcaatcatctctaaggtccctaagagggtggagaattccatgttccacgttattcatgggggactcacaagatctaactaaagaggatggttctctctccctcatccaatagatgaagaagacacagaaaagctgggcaggatgggaacttctaccctggtggtcatgtgtgtagttgatttcacaacaggaactgaaacagtgctgcatggacaatgtacagaactgctggatttatggtaaaccctggtggaattagaggaggaaagcagcagcacatcactgcaggttacaggcacctccaagagtgtgacctgcaccttccacttcctctctccccactcttcctgcaacaatggacaacaggcaaacactttgtgcacagcaaatgtttcatacatgatcccttgttaatacctttgaaaattttcaatgcaaattttaatgctttaaatatttactgtgtactgactccctagccctcacctggctttattttcttctataacatatattgcctgctaatctaccataccattttcatatgtattatgtttattatcttttctccctactctctgcaaacaaagatttttctctgttttcttcattcccatatcctatgatatggctggaaacagtgcctggaatatagcaggtgctcaataaatattggtgaaatgaaatatactgatagatggggcgcagtggctcacgcctgtaatcccagcactttgggaggctgaggtgggctgatcgcctgaggtcaggagttcgagaccagcctcaccaacatggtgaaaccctgtctgtactaaaaatacaaaaatgagcctggtgtggtggcgcacacctataattccagctactcaggaggctgaggcagaagaatcacttgaactcaggaggcggaagctgcagtgagccgagattgcaccagtgcactccagcctgggtgacagagcaagactccatctcgaaaacaaaaaattatatatatatactgacaaattattttatgattattactactggtctgtttaaaagccatgggaggcataaatgtagatggaatgaaggaaacacaaagttgccattaggacagcaatgtggtaattactacaaacacgatctacccatggatgctaggaaataacaaaatctctgtattgtcttaaagtatctcctccaagatatttttaattacaaagagaaaaatagtaattttaggatggatcaacacagcagacacacccttaaacaagtggccagggatcacatcaccagtagaaaagcacgctggcatcacagacccccgggtgtgaggcacagagcagggccccgcacccctgtgggttcttgccaatgatgcatcaccgcaacctaatcatgagaaaacttcagacgaacccagatggagggacgcaccagaaaacaactgacatcctaaaaatgactcctcagaaatatcaacgtgtggtggggcgtggcgcctcacacctacaatctcagcgctttgggaggctgaggtgggtggatcacctgggcccaggaggtcgagaccagactgggcaacatggtgaaaccctgtctcttcaaaaaatacaaatattagctgggtgtggtggtgtgcacctgtagtcccagtcactcgggaggctgaggtgagaggctcacccaagtctggtaggtcgaggctgcagtgagtcgtgactgcaccacagcacaccagcctgagtgacagagtgagaccctgtctcaaaaaaaaaaaaaaaaaaaaaaaaaagtcaagctgatgaaagacaagccaagtatcaggactgtcacagattggaggatgctgaggaaaccccacagccacacacagtgtgggaccctggactgggtcctgggagagaaaaaggacatttttggaaacacaagtggcatccacatgaagcctggagtgcagttaatagtattgtaccagcgctggtttctcagcgttggtaactgtacagtggttgtgtaagatgttaacactgggagaggctgagtagagggtatatgtactcttttaactctgtactcttttaatcagttttctgtaagtctaaaaatttcttcaaaataaagtttaaaaagttgtcagaagggaacgcaggggaagagaagagtgtgctagatcagtgttctttctcaactctccaatgtcctccccatacctgacttatccttatgacactgtggcatttcccggtcccacaaggacgctccagcagccaaacctggaagcagcgtgctccgtccccaggtgaaagaataaggaagtgaggccacggtcagaggaggcaaggcagcaccggaatccccacatacaaaaatgggtttcagccaggcacggtggctcatgcctgtgatcccagcactttgggaggccaaggtgagtggctcacttgaggttgagaccaacctgggcaacatggggaaaccccgtctctactaaaaatacaaaaaattagccaggcgtggttgcgtgtgcctgtggtcccaggtactcaagaggctgtggcaggagaatcgcttgaacccaggaggtggaggctacggtgagctgtgatcgcatcactgcactccagcctgggcaacagagcaagacccgtctcaaaaaaaaagcaaagcaaatgtgtttgctccaggctggttcaagggcttcccttctggcatctcaggcgaggtctcaccttacataggatgaagtggcaggaggatggacatgtgaaaaggattgcatgacaccagaaaaggaaaagcaaacccattaaaataggcaggcttccagaagagaggaatttatcttcagagcctcctaccgtccacacgaggcccagcagagacgatgagtggaaaatctgcagaggcttggccctagtagccaccagggggcggtaaggcccagttacaagagtggcccagacactgaggctgactccattcccgacattgttaaaacctcaatcacccctgtgaagatgtaattatccacctctctgggttggaaagcactggttttaggatagaatgctagttctgagcagatgaaactggttgcttattccaagcgcttctatatatcatacagtacactagcttgatcattcttgtttccaacaatacaacagctatggcacagattgtagcatctggatgaatagcctagtgtaatatgatgaactaaggaacagccagatcccaacttgatcctctatattcacttgcaaaaatgtggtcctgagtcttagcaaactgcaatggctgcctaacaagtcctgaggacaaaagcatgggattgagagcgcttgtctgaatggagacccccccactcaacacacagaaacatcaagctgagctctgctgacagggcaggcaaaagcagccttctcttaactgtcccacttattagaaagtcttatatatatcttcaagttatcattttaaagaaaagaggagctgggtgtggtggctcacacctgaaatcccagtactttgggaggcctgggcgggtggatcacctaaggtcaggagtttgagaccagcctggccaacatggtgaaacccagtctctactaaaaatacaaaaaattagccaggcatggtggtgggtgcctgtaatcccagctacttgggaggctgaggcaagagaactgcttgagcccatgaggtggaggttgcagtgagccgagactgcaccattgcactccagcctgggtgacacagcaagactctgtttcaaaaaaaagaaaagaggaaaagatctatttacaacattataatttgaattcattgttacgaggttttaagaagtgaggctagttagcaccaagtctgagatttgagaattcattcttgcactgggcttaggacataatggaagctggacccattttacacatttagaaaatgaaatcacccaatcctctatcactaggtcatcccagaaaatgttcttacttacagacatgggcagtgagtgagcagaaaacagaatgaccacctcgcttctcttctcaagtggaaaatggtccagttcctttagaatatgatctgcaaagcactgagtgagtaacaagaaaggaggataaagaggaagggaagaaagaaatggaaggaaaaagaaaataattttaaaatgaagcctacaccaaaaatctcagagcaaccctcaaaaatccgaactctcttttttaaaaaattgcaaacagtccagcctctcagcattggtttatcatcaaaatggatcataacagtttcaggggcctagggaatttgctgggaaacttctaaagctcgctaatggctcactgcaaatgcgcgctgtggatctgcttcccctcgggaaggacagggcacacttccagatggaaaggaaacacagatgggaaggagttgttttaagacctctcatttgctccgttagcaggaaaacagcttacagggtctttctaaagcctccttagtttggctttcaggcataccacattaaatacattagtcaggaatagtagggaaataagaaaatactgctctatttttataacagtttcttctgagcctcatatccccatcaagtcaatttttataaaaaccttcacaacaacagatgacaggtgatacacacccattaaattcacagagccgggaaagatgtggtaaacttaggggcccattcagtcacatctgtggaacttgagaaagaacatggttcctgcctccccctccaaatctctgtccaccagaccagggagctcccttcgtctagccggcactttgattcacgtcgataggtgctgaaataccagaactgaaggggctttctttcgtcttatactttaatcattctctgtcatttagcttataaaaaaatgctacaaaagacacaaatgggtcaactgacaaaatcagaatatgaatgtaaattaagtaaaagtttaaatattgacgttaaatttactgaagttgaatgttgtattgtggttatgtaagagaatattcctgattttagaaaacacacttaagtgtttaggtgtagaggatggtgatatatgcataacttattctcaaatgggtcagaaaaagaaatcatgtttatacaaacacagacacacacacatacatacacacacacggggcgtgtaaatgataaagcaagtgggatatacatgttaataacacatcaataggccagacgcagtggctcacgccagtaatcccagcactttgggaggccaaggttggacgactgctggagcccagaagttcaagactagcctgagcaacatggaaagacctaatctccacaacatttttaaaaattagcagggtgtgatggcacctgcctgtggtcccagctactcagcaggctgaggcgggaggatcacctgggcccagaaggttaaggttgcagtgagctatgatcgttccactcaactccagcctgggcaacagagtgaaaccctgcctcaaaataataataatacagtaatataggtaaaagagtagatgagagttccttatactattcttaatcttgtaacttttctgcatatctaaaattatttctaaatggtcctttgtaactttttaaaaattataaaggacaatttatcagaaacatgtaaatctgcacttgttggtattttgatacatcagtggtcagtgaaaactatgggataagcaaactattccctaataaatattgagatattattaatctttccagaactctcaaaatttggtaaataaatatcctaaggcataaaatggtacctaaagttaagttcccttttcagaatttataatgtaaattctcagcaaatgtgacaggattagatacaaacgaaaccaatattttctggtctttgcagtgtttggaaactaaagatgctcagaaaggattatttttggacctcagcctagataaggaggcccactgcaaggtttatacaggagcctagaagataaatttgctccaattaacccaacagctaaataaataccaatattagagaaaacagtaataaaatggctatttggagcaattactacctatgccaagcagaaatgtggattcaaaacagaatttgtagttttaaactatatttttcattttagtttagggttttgttttctggtttccaaaaatgtcatatcgtatccaaagcctagtgtttttcttttctcggcttgcaaagctgcaagtaaaaacacaaatcatatggcttgcaacagcctctaagccatcttcaaaactgaggcgccatgggcaaggagaagtgctatttaaatcacctaaaacccatctgcggtattttctactcccaacctctctgcagaatgaaagaggcaccgagcctctcagagccttcaatcacaccatctaggagggcagataaatgcctctaaaattccctttcattttatgaacagagacttcctcagttaagagacctttccatcgttttgcttccctccttttcaaagggctgaattttaatgcaaatctaattactcacttgatcagggcaggcagatgctgtgcagatccctccattccctgctaccacatgtcaatgctgacctgaaacccccctcctttccaatcgcaggcctcccaaagcaaaacccaggctgctggtgcttcaggcagtactggctggacccagcaacacagccatcaatggtgcacacagagaccacaactacacccacccctaagggtaagctccttcttttcagtttttacttaaaattggatttcaacccaagtgttaaccctttacatgcctaaggaacactgctctggggagagctggcctgatttcaatgatgtctagcaccatctagtggtcacagatttaaatgacaccaggcttctaaagaagttgttagtagggttttttgccgggagtcagaaaacgttcaaggagtgaaaaataaaatggatcaaatctaaatgacttaatatttcccctacctaaaataactcaaaagcagaaacttctactagcagaacaaaattatatttgcataatttagggcaatattttaccaattgccctcccatatttgacaggcagaaaagaatatggtaacatcagttcaaagctattaactttagaactgtaattttaacttattctcctaaaatcaagcatctgttaataaaaatattataaatataaattgcatagaagaaatatgaaatttcttttaatatgtgaaactttctcaatcgaaatgttcaatttattttcatgtctcagaacatgtagatatattacttttacattattaaaatcgtttgacattttaaaggatttagaaagtagaaaatttaattcgttggtcagtcactcaacctacaaatgtaagttagctgaaacaccatgcacaatctttaatgctcttctggtcataggaaacacaaaactcaaaatatcgttttgttatggtttgggactaatagcattaatctgaagaaagaagagtctagtcattttaatctttaaatgtattttctcttttcataataaatcaagaatataatacttttatttaatcccaaacacacaatttaagcaagggaacagtaaggctcagaaggacatccacaaacccagaagggatgagaagctgattcacactagatgctggggtgacaggcagctggcaagcactggcttacctggatgaggaggtgatgtgtgggccacctgtcaatagtgctccacttcatcgtgggcttccgtcccacttgattatagtatctgtaaatggcatttaagctgctgcctgaaatatacagagaccacttagtagatgcattttgattatggtgaaaataaaaaacagactcgtaaaggtagtatatataagttcaaagcaggtaactgcttctttactgaatcagtctaattacaatcatttcaatactctaaaatgcatatagatttaactaccctgcaaatgaagatcactaaaaagcaatcaatttcaatggactttcaaagattattgatgtcagttctagtgaaaaacaagatggccgtaaagttatgaaatataagcagtcatatttacagggaccaagtcttacaattcaaagtatgtcggccaggcacggtggctcacgcctgtaatcccagcactttgggaggccaaggctggtggatcacctgaggttgggagtttgacaccagcctgaccaacgtggagaaaccctatctctactaaaaaatacaaaattagccaggcatggtggtgcacctgtaatcccagctactcaggaggctgaggtaggagaatcgcttgaacccaggaggtggaggttatggtgagctgagatcgtgccattgcactccagcctgggcaacaagagcgaaactccgtcccaaaaaaaaaaaaaaaaaaaaaaaagtatgttattttttttccagttacaaaggttatcaatcccattataggaaatgtatgcgatggggaagaaaggaaaaaagaaactgaccattatcccagcatgctaattacagtcattgctttactctaatatggttctttttttctttatagatgttttgttttacaaagttgtaatttttaatacatatgcaattctgcatgctgagtattttgagcatctttacttaatattatgaaataaatattttccatgttatgataaaagctttgtaactattgtttgtttgtgagatggagttttgctcttgttgcccaggctggagtgcagtggcgcgatctcagcttaccgcaacctccaactcttgggttcaagtgattctcctgcctcagcctcccaagtagctgggattacaggtatatgccactacgcctggctaattttttacttttagtagagacggggtttctccatgttggtcaggctggtctcaaactcccaacctcaggtgatctgcccgcctgggcctcccaaagtgctgggattacaggggtgagccaccgcgcccagcataactattgttattaatggcctcatgataaggagagaaaattattgaagtttctgtgagttctcattccctagaataagctaaatggacaccaaatccttataagtaatctaataaacttatatttctaagagagagatggaaatcatgaaaactcaaagcctaaaggaaggcagatggtgtcaacccaatgtaactttttcctgtctaggggagttagcattggggtcacacctgaatcctatgaaaccaagtctaacacacagcctcttcctcagtcttaacatagggcaagtcccaaaacatttccatgctttccatcaccgatccactgggctctctaactataagaactattagttaggtttccagttgaaaatggtagtcaggagagagcatatcttaaatcacatatactctcagactaagactcaacttccaaaaagataaacaggttcaattttggtgagtagaatacagtgaatcagaagaattcaaagggactccattcaaggttcagaaacaatctctccagaaatcaaaaagttgtcacgaccatattcacgttacagaccgcacttcacaggtggatatcattttcatatgtgcaagggggcatctggaagctacattagctctttcaggttgtgtggaaacattcaacaaacaacccaaagaagtcattaaggagaaaatgtgactgagaaatgtgtttgtgataaagacacacactggctctgccacaatagtgccagtctaaaagatacaacagataaacagcatttgagtggcctcgaagaattaacgtacttcgcaaagccttccacaacttggatagacggatgtacctgtccttacatgagatacattcaagaaaaactaagcatacagtgaagttttgcatacactgtcacttggtagagccagccctgaaataaaaaccatagtcaatcttctgtcatgtaaataacaatcttcttaatttatctaattgtgagagcagccatttacatattgaggtatatttcttaaaacaaggcaaaagtagagcttaaaaattcataaaatctgactccttctccagtaacatatgaccagacattttgaagttgtagtggtgcatttccaaaagaaaaataataattcaggctgagtgcggtggctcacgcctgtaatcccagtgctttaggaggctgaggtgggtggatcatttgcggccaggattttgagaccagcctggccaacatggtgaaaccccatctctaccaaaaatacacaaattagccgagcgtggtggcacatgcctgcaatcccagctactcaggaggctgaggcaggagaatcacttgaacccgggagatggaggttgcaatgacagagcaagataccatctcagaaaaaaaaaaaaaaagaaagaaatgataattcaaactcttgagggtatcttagaactcaggcattttaatgggttctctgaacaaatatttaaggcacataacaagctttgactttttccaatagccttttgattctccttatggttatagaagtgataaacattaatatccaaaagcaatttgggactaagaatgtgctgacttcaatccttgcaatggaatgcaaacaaatgtgtctgtgggtgacagtagcagctttgcctacaatgaatgatacagagattgccaaacaccaattattccccagctccagttaaatatacagaaaacgacaagcagtaacattttccaaaatcaagaaaacagaaaattctgcaaagggaaccccaaactgggctttagttttaccagcaaccaactcataactgaagcaaaacaacgacaacagcaacaaaatatcagtatttcccatgttgtatgggcatctttgctttcaaaatgagaacagttacaatctttgctacatcagtaagaaaatctgggtagccataaaaaggtttatcacacaaacccagaaagagccttaaggttcattactgatccattacacaatggcattaaagcactgaacactgacagccactgcctaccacccacaccatttgtaattaccagccaagtggccaataattcaagggacagatggaccatgagatttcaaatggactgacctgaactctcgtgtttaaagaagacaggttgaatttgccattcaaattgcaaataattcatccttcccttcagtacttagactccttggttatttttgccagcaccgtatctacctttccactgtcagagagatgcccttacctgtggtggagcagctgtactgtggatactgtgtgaaagcaatagccctttctaggccatctctctccatctcttcaattgcttcttctgttaaaggatggacgtaccgaaatccaatatagtatttgtgaggggctattaggaagcacatgtggaaaggagaaagtgttaatccttatatagattcctcagagtcaacaaacataatgcaatgcccagaacaaagaacagttcatgtaatttcctatggcactgacggtgaaggcaagtttagcatattccttggatcttatccactcttcagctggtatgtgaacttttaatgatgactttctaggatcagtaccccacccacacacctttactgcacagtggtttttaaaactcaaacttctcttcctaattctctgttcttggctggcataagagagcctcaagagaaaggaggaaaaaacaacacttattctaaaatataacttcctcttgcataccagatactatggtagccactgggcattatttttttaatcatttaaacctgattttccagataaggaaacagagactctgaaggttaactgaactacccaaagtcataccttgcaggtggtcgagctggaattagagcctgggtctcccaacccatgcttctcactcctcccaggccccccacctcaccctgctcctattacccagttccccgaacccccaggccacctcgtttatataaaaaaatgcaagagctcttgcatacgtaaaaaaattcattgataacaaatgattaaaatgattctcctcattacacatataaaacagtgcttactttggaggtgccacatgggattgaaagccattgttcttggtacctaaatggcccatgcctgctgtatatcctcatgttctttccctgtcccttccctgtcctttcacgaataccctcttctatcttctttatcctcccgcatcttcctttcttgtagttcaaaaacatccacaccacataattgtttaagcatgtataaagtcataaaactacaagtttcctaaacttacttagtcttgtttccttgccttttcataggattacacataacttacactcagggatgatagtgagaatcactacatgagtgtcaggtaataaataataagaccatgataatgttactgtccaaagcattagcaggggctgcaactatgaatgtgacataaattgccacaagaaacatttaggttaaagtgaaggaaaagacgggagtttatctcatttatacctagatatatacaaggacgacattcctcctaacttgacccagagagctaagagccaggggaacacattcccaagggagaagcagaatgccattaggcgagagaagcacatgtgtgcacagaaaggctggtcggactcagtattctctggttgggtactgcaaaaaagaagaaggaagtaaaactagatcatttttagcgctctgtccattttccggccaccaatttcgtgctgccttgcataaaatggtcactagcagttaaaacatatcacaggacatgatcccataagcaaactccaaatgactgattgttcaaagattatgtgctttgtgctaaaaaccgccaactattacaataccatcaaatcccttgaagcaactcttggtgatttgagctgaggtttagcaagcaagtagaaactgctttcgattctactttgaaacaatacgatgatcagaatgacatccccagtgctgcaggtcaaccggcttctcgcattttcttttcacctgtccagtatctgaaggttacggtctaaatgcctagggtctgggagttcctcaaatcatgcatactaagaggtagaaaggctgcccttgcagataaagacaagggcaggtggccacattttaaagtgagacagagtaaaataccctggaaagaactgataatgttttctaaatgctttctaaagacaacctgtaaacacatattggagaaaaagcagcaaggtactctccaactgggcatatcctgaggaaccaacaaacagtgttcatgaaggacccgtgtccatcagggtgggtttcacaatgcagctggctgtccctggaaggatgcagggatgagaaggagcctctccgatgttaaccagtgccacatctcgtgggcagatctggccagagtgagcccaaaacacatcactcactggcctagcttacgtaccctcagagcagctgttcaatgaacagtcttcagcaagaactactaaaagacagagaaactagatttttaaacagcaaaaacttcattaatttagcatgtacaatagttcaaatgtccgatttgtacatgattttttgaaagaaaagtttgaaatatgtagcaaatgcttactttgtatcagatcatgaaccctgtgccaatgatgaattaaaaagctcacgtatattgaacttttgtcatgttaatgcctctcaggattatcgcatttaattttcacaaggatctaagagttgagttctgttaccatccccattttctagctgaggcttagttaagtaagtaaactgcctgaaccagagcagggaagccaacaccatcagagaaaggaacccatacgcctatccacgctgcatccgggaaagaacagaattatttcatgagcatcccttacttatagcttcactaaaagcagttacaagctaaacagttaaactataatttgcaaagcatatttgagatttagactttccatcacatgattacacttctcatctatttctgtatctattctctacatttctgcaatgcaatgtaactacatgaaaccatttcctgatataactcactgtcttagttaactggtcaattctatgaaaccagtgcaagtctcaaaacgtccacactggctaccaagcaacaaccacttccctaaaaaacgacagcatgaaacatgtttatctgtttgcaatcatcacattttctggcctaaagagaatttttcttaatagaaataaatcaatagacatagttcaaaagtaaactttacaactatataggaaagaaaggatcagaagggaagaggaatgagaaggagatgaagaggtaccccagcagcctcaccggagacaggaggtggcgggaaggatgccctcctgtctgtattgctttttcaagtctgacaactctaccagggctttaactcctgggctcaagcaatccttctgcttcagcctcccaaactgctggggtgtgccccacccccatgctcactagggctctttataatgatgggtactacagtaacataaaaacaggaaaaatgggaacctttctgcctcctcttcccacgagagacagcatagcaattgcaaatctggttcataataaaaccttttttttttttttgagacagggtctcactttgtttcccaggctggaatgcaatggcatgatcatggctcactgcagcttcaacctccctggctcaagcgatccttccacctcagcctcacaaatagctgggcctacaggcgtgtgccaccatgtctgactagttgttgttgctgttgttgttgttgttgttgtcgtgtgtgtgtgtgtgtgtgtgtgtgtgtgtgtgtgtgtgtgtgtgtagacagagtttcaccatgttgctcaggctggtctcaaactcctgggctcaagcgatccacctgccttggcctcccaaagtgctgggattacaggcgtgagccaccacaccaggcccacaagaaacctctgatcatgataaactgttaatgactggagtttgttctctagtaagtaggtgtgaatggagggctgacattttaaagatgcactgtggcatgcacggaggaactgcataagaaatgcccttgagccacagctttaagcaggaagcaagccgaatatgcagaagcacagttgaacaattttcgaagtgaggtgatctgagaaggggccagggccctttgttactttgtgccatgggaaccagtggattctgagaacagctggagtggatgcttgctcagtgatgtcagaaaagagtgaaatgctccttttggtcctgcctagtggagctgttctccctgagggttcccagtgtcacacacctatcctgatcccaaagctctaagatatatttgcaatgaatgtaattcatgtgtcctaagatgtacatttttttggttttaacatttctcatatcagttcagtctacaatagatgttgtcttaaaattaaccggtagtgcttttgtatcttagtattatacaaaaacagggtgtcctgcaatgaattgtgtcttcgatgtgtttaatacagcatttttacttcatccatgcatttagtggttcattctgcacactattattctggatagaggttctcagatgtgcacaatcctctttttggtgccacgtccaacaaggaccttcaataccttacaatggtgatattctgagagctgaaagcatcactgcgagttgcttactgtcctgtggcttccatgatagctagctaatactgctctaaatattctaatcagctatccaaccagaaagaaaaggcaataatagcagcagcctcaatccatttcccaaagatttctttccagtgtaatgatatatgcatctttctttcatggtatgttgcttatgccttatactctagcaatttaacaaacatctcgaacttccttttgaaactcatgtcccaaatccttagcttttttttacttgtaatgtaagaagtcatagcaaaggctaaaggtcaagggataacgcctggagacctaaattaagtgaccatgtattatgtagaaacaccacaaattgagttgccagtacatatgaagcatttagcatctactactcttttgaatttcataactacttcgaaagaactaatctagttacatgttaatgaagaaacaccatacctgtgttgggggacaattcatccagcagcttcaccatgccctctccctgcttggaagtccatatcttgatgggggatccgcctccaatcctgcggtactgctcttgaatcttgggggttcggcgtttggcgatgaatggtgccagcttactaaatcatttaacatacaggtaagtggattttattccagcttagcaacctgagaaatgttttctactcaataaaaaagaaaaaaagcaaaattttagagagcctaacaagattaagcctttaaaacagaagcttgaggtcattgacaatagccagctctcttgttgtagaataaggagctaaagctataccctctctgaggaatacccagctgtgctccacaagctgttccagcagcacacctgaagattcaggacacacaacacccatgcagagaaacctggatgtgcgctagctactagcgtaacacattttgatcccacacctaacgagaactaggatataagacaaatgaagtagacatttctcttaatttaaaaaataaagtctattaatcttatagatacacttgcatataggagcaaagatgtatgcacaagaatgttcactgcaacactgtaaacaaactaattgtccaccatgaagcatggattaaacaaattaagttacagccatatgatgcagttctaaatagtaatcaaaaaatgagccagacctatatatcgatataacgttatgaaacaagatacagtgttaagtttacacattcacaacagcaaagacttggaaccaacccaaatgtccatcaatgatagactggattaagaaaatgtggaatactaatgcagccataaaaagggatgagttcatgtcctttgtagggacatggatgaagctggaaaccaccattctcagcaaactatcacaaggacaaaaaaccaaacaccgcatgttctcactcataggtgggaattgaacaatgagaacacttggacacaggaaggggaacatcacacaccagggcctatcgtggagtggggggagaggggagggatagcattaggagatatacctaatgtaaatgacgagttaatgggtgcagcacaccaacatggcacatgtatacgtatgtaaaaaaaaaaaaaaaaaaaaaaaaggaaagtttcaaatatagtacataagtaccttcacatttgtgtaacgaagtgggggggggggtgtgcatgtgtgtatgtatgtatgtgcgcgtgtgtgtgtgtatgtatgtgtatgcttggatatgcacggactatttctggatgtaacagcgctttcctccaggtggataactgggagtgcaaggtgaaagggacacttgccttttactgtaattacttttatactatttgtagtttttatcccatgcatgtactaatttttcataatagaaatctattttgaaagaaaaaggagagaaggaagaagggaaagaaggatgaaaggaaaagaagggcagcaacaatccatatttatagtacaaatgaataataatcattgcttccctgagtgttaatcagccgttaagtgacaagtacaaatatatctttaaaaatctttaaaggtacctaggctatgtcaagacaactgcaatttccagggctctggggagcaaagggctcaaggagaatccccactaacttatttgctctctccccctgcaattttctgatatcatatccttctgatatccaacagaaaacaatgctgctgtttaaccattaccagatacgcattaaaactatttactggtttgaaactacagaattgagagacacatgtcaatgtagtgccaaggttataattgaggtgtttatatatatctcacttctgaataggaagtgtcatgaggtctcggtccaagaagagtctcagaaggaagtcgtgaacatctccaagagtttcagggcctcccatgtttagcattaatattccagttttcggcttcctatataaaataaaatacaacggttgatttgtcacacttcttattttcttccagggtggactcttggttcagccagcaaactctaatctgttccatacaaaggtaaatactatggctcttttcactgccgtcacacagatacctattcggggacatctgtggcctccagttccccatggtcccagctcagacttggacctttgtcttttggcttaattcatgatatcagtcttcactccgctagaaatgtttcccttttaaagtctcggcctgaagagagatcgaacctttagggactgggagtcaaggtagaaatctaaaattgtcctgcagctaaagcacctgtacatgtgagtaccatatgaatacagaggttacctgacctctcccaacttcaagtttcctcatctggaaaacatagcacccaccacctactcaaaatgctgttttgagaattcagtgggtaacatcttcagtcacttagcacgtgctggcacatggtaagttctactctacacagagcagggttcccccaaaattttaaacctccacagtctaataccagcccatccccactcttgcatctgctcctgtctctttagtcaattattaaattaaatgactactgactgaaattagtttttacattttatttttgaaatggattctcactctgtcacccaggctggagtgcagtggtgcaatctcagctcgctgcaacctccgccttccaggtttaagcaattctcctgcctcggcctcccaagtagctgggattacacgcacccaggctaatttttgtatttttagtagagatggtgtttcgccatgttggccaggctggtctcaaaatcctgacgtcaggagcctgcctcggcctcccaaagtgctgggattacaggtgtgagccaccacaccaggactgacttaagttattgcttgctcctctgcttccttctccaagacctccctctattccttcatccatggctcctgttatgataaacttctcctctccatcctgcatgtaaattcactgtgtagataattcctgcaagaaccggtgctaacattcaaattagtcccaggctacagaatcaacccctgaataagcaggaagaagcaaaaagaaagcagagctccataacaagttttaggtcaagcagcttctggaaacttaaaaaaacaaagtgctatgcaaaaatgtaaacctaaaatccagatcaagctccggagtcaacacagcccaaagtgagccaggccaggagctccccactcctaagccccgccagagggcaaggtgaagtcggagcaggaccaggtgcctctggcacgctggcaggagccaccagaagaccttgcgtgtccccatgagcaggtagccatgggatggcaataactggggaactaaagatcaaggagcatttcttccattcattcattcatctttttttcatatttaaaaattgagatataactcacataccacaaaattcaccataatctgaacaattcagaggtttctaatacataaggaaaggcaggaaaccatcacgactatctaactccaggacatctttaccccacaaagaatcttcgtatccattaaagccactccctgttccctcccctctcacccctggcaaccagtaatctactttctgggtctatagatttgcctattcaggacacttcatagaaatggaatcacatgattgtgtctggttttactcagcataaaatgttcatgattgtgtctggttttactcagcataaaatgttcatgctacgtgtcgtagcatgaatcagtacacttcactcctctttattgctaaataatatttcattatatggttataccctctattcactttcaataaagcagctgaaaaataaccagcctgaagtttatctaaacaccgttattatgaacgctgaggggtctacttcctgaatctcctacaccagactacctctgaccactgcagtgactaaaccaatgctgctgagacagagcctgtatagagaaacattctttatgtgctcgaaaactaaagatactatgatgacatcttttttgtttttgtttttttttgagacagggtctcactctgtcacccaggctggagtgcagttgcacaaacaaagctcactgcatcctcgacctcccgggctcaagtgatcctcccgcttcggcctcctgagtagctgggaccacaggcacatgcctccatgcctggctacttttaaaattttttatatagacagagtctcgccatgtggccccgactggtctcaaactcctggctcaggctcccaaagtgctgagattacaggtgtgagccattgccccaggcttatggtgacatcttaatgggcaatttttaaacaattattaacaacatttggcaataacgtaaggcagcagggtatgtcaaatgtaaacaggtagaaactgttttcttgatcaaacctgttgtataagtggatgaggtaaaaatctgaattctcaacctactttttcagaatacgaatcaattcctggggaaggagaaatatggcattacaatgagatcagggattttctcatttagaccccattataaagattaactaaggtcccttttcacatcaatgccttcaaccggggtttttcaacctcagcactactgacgtttggggctggagagtcctttgttgtagaggacggccctgtgcaatgcaggagccttggcagcatacctggcctctacctgtacacaataatagcacacaccccaccccagtgtgacaaccaaaaatgtctccagccattgccaaatttgtcccaggaggcaaaaatgcccccttccccctattgagaatcactgtcttagagaaagagggcttaatccccttctaaaacaaccaagcaactgcactgaagatgtggttgttatataactcttccatgctcgagtcctacaactgcattaacgggtgtgttgagttttctttccttgatatttgaaaattccagatgcattattttgtgaaactaatattcgtttaatctttctacttagaccactagtcttctcctgggatcctgtctttcaccttcaaaatctgtgactcacaataaattaagtgcattttcccatggattgctgccagttaacagattactggttaaaaaaacctcaggctaaaagacttacctaagccacagacggtatcagtgtgcaaacgggatttagagctgtttttcatctataacacctgagctcagaacaagagtggctttaaaggggatgctactctgccctgctcatggttttgcaaacgcatgttgatcttacacatgaaagagatgcacacgacttgaaaatacctaaatacacatgcacttaattcaaaactgtgttgtgcatgatgaatagcgcattagtaagccccagtctgacacccctctattccagaatgtgaagtgaaagctttagtcaagggtctccatctcctctccctccagacagaacacacctgagaccaaggtctgaacgttcatgttccgtttgtttgaatataaaagtgtatacagcaaaatatatttaaaacttctcacttggaaaggtttcaacattttgccatttttatatcccaggactctcaaaatacaaggtttttccgtgaaatattaaatgtacgtaacagaaacttaagcttgtcaattaataaacaataattctattctactctatatggtcagcctcaagaaaaagtaatacgatcccagctcttcattaaacctctaagacatgattggcctgtgggtctatgatgcctctagaacagaatttggtgaactatagcccatgcactaaatctgtatacacacatacacccctactgcctgtttttgtaaataaagttttactggaacacagctcccctcattgtttatgtaatatctatggctgctctcacactacaacagcggagttgaatagcagcaaaagacagagtttggcctacaaagcctgaaaaatttactacctaaccctttacagaactaatgtcaacccctggcctagtgtagtgtctactctagtattgcagtctagtccagcccaagcattaagcagcacaatgccttcataatgactgccatcagaagaatccacaaagacactcactgcttcaccatttctaatattaaaaaactagaaatcacctacgtgtcccagaatgttggtcaaggtagtttatgacttaataaaatactcttcagttactaaaataatatagacaagtatttatgatgataaagtaaataaaaagagggcattataaatatatgatgtacagtacggtcacatcttgctaaatacatacagagtgaatatttaatagtcatacagacaaaattggcctggctggtcgctcacacctgtaatcccagcactctgggaggttgaggcaggaggactgcttgaccccaagagttcaagacaagcctgagcaacacagtaagacctcgtctctattttttttttaagaagacagagagagacaaaatattgggtggtaagattattcataatgttttaaggttttttttgttgcctatccgtattctctaaaatgatcccatttattttatataaatatgatctaaagttacttagtagaatttaaagactttcatttaattttaataatattaagcctacttatattaatgagttgctgctagaaaaacacacaaatgaaataatttttcttctaggattccaaactgaatcagttcttcagtttctatcaaatcccaaccctcagtgcatatggctgaggtggggagaggggctgggaggggcaaggagaaatggaatgggccctgcttggcaggctgccagatgaagaaggtatctaatgcccatccccaactaacctcaggttacacagcactcagtcatcatacccatgatcatatagcaaaaaacaataaacacacaataagaaaattttggttctggccaggcacggtggctcgtggctcatggctcatgcctgtaataccagcactttgggaagccatggcagaactgctggaagccaagagttcaaaaccagcctcggcagcaaaatgagacccccatctttacaagaaaaaaaatttgttttaattagctgggtgtggtggtgtgcacctgtagtcctagctacttgggaggctgagacaggaggatcacttaagcccaggagttcaaggatgcagtgagccatgatcacaccaccgcactccagcctgggtgacagagctacactcctcaaaataaaaacggtggctcacgcctgtaatctcagcactttgggaggccaaggtgggtggatcacttgaagtcaggagttcgagaccagcctggccaacatggtgaaaccccatctctactaaaaatgcaaaatcagctgggtgtggtggcatgcacctgtaatcccagttacttgggaggctgaggcaggagaatggcttgaacttgggaggtgtaggttgcagtgagccaagatcaagtcactgcactccagcctgggtgaaagagcaagactccctctcaaaaaaaaaataaaattacaggctcatgcctgtaatcccagcactttggaaggccaaggcgggcggatcacttgaagtcaggagtttgagaccagcctggctaacatagtgaattcccgtctctactaaaaatacaaaaattagccaggcgtggtggtatgtgcctgtaatcccagctactcgggaggctgagacatgagaattgcttgaacccgggaggtggaggctgcagtgagctgagattgtgccaccacactccagcctgagagacagagtgagactctctcaaaaaaaaaaaaaagatatatatatatatgtgtgtgtgtatatatgtgtgtgtgtgtgtgtgtgtgtgtatatattcatacctgtataattttcatcaaacaatgtgtgatctagcagaaaggtcatggagttaaataggtcccagctactttctctcactctgcctgatgttaaagggtgctgtttctatgtactcatctcgataacttccctttatagagtcttctgttgcctctgtacagaggaagacttgggagcggttgtgactcctgttactaaagaggacccttgcaacaatgccatgcctgctgccagccaccagcaacagaagaggtgaggtatgaaacgtgtacttcacttctttaatagatgataaatcctgttacttcttttataattacgttcactgtgttaagggatgaaaaacaatactctagcttcctatagaaattcttggtagaccagttattcgttatcctgtacagaacatacatttcataggcataattatgttaggttcgtaaatacatttccagcatatataatttgtgttatgtgacatattccagaaccaaattcttaacacaatttgcagactgtttgtactcaactctgtgtcttttaacaatagccctgttgcagggaaggatccagtggggaaggagggtgtaaaatctatggtttaacagctattgaaaggaagccaagaaaatagctccttccacactggcttttcccagcacctttcctcccaggcagcttgtgtctattggtgtctgcatcgataaagagaaattcttatttgtacctgatgttagactcatacctcttctgcggttgaacttgaggttttgcaccctgggcatgctgggctgtttctgtggtgacggccgctgcagctgcacctgacttccacctccatggctgacagaccctccagctgctggatgccactgtgacaaaattaaagtgctcgcatgaaatctagctagaaagtaatttcttctgaagaggtcctcagagcataattcctgactttaaaatttaaagagatcccatggcagaaatgattttcctagcatttctctgcaggcaggtaaaggaacttaagccctctccaaggggatggggtggaggatcgctcccctaggatggccgatgagagcctgcagagaagcattttagaaactacacacacctcctctccccacctcggctgcagattttgatacaatccctcacaagaacccctgcacgagaccaacatgactgacagtagcgtgctgctcctgtggaaggagaaggggctgcagaaaagtgaaaagccgccgatttcgggagtggcgagtgggccagtttccaaatagctgcagttctcctttctgcctccaagccttcttcggaaagcactcgtgctgagaacccagtactgcccttgaaccttgacaaggggcctctgcttcccagggcctgttctggccctcctcccactgcaccccaccccacggggtatgcagtctctaccaccaaggagacatgccaccccaggagtccacatcccacgtgccagaccaggctcccagcgccccaggattccctgtcccccaagctccacacccactcccagggtctgtgcaggcattttttcagatccatcctcctgagggaggttgtgccatcagtggatcaagtcttgacctgaatggtggccaagggatagatagctgtttgcaggggcaagagtggaactgggcatgaagaccagagagtccatccaggctgtctgtgaggctccccacaaggccagaaagagccagcggcaagaagagaagcaggaaagcatgtcagtcagaggcaactctccaaaggcctctacacttctgcaggaactcagagagttcaagagctcatccttccaggttgtgatcaaggtctatttgtcaacataggaggacagaacatatttcccagtttgttagcttgctatatcccacataccatatatgtgccttcaagtatacccttgtcctgggccccacaggaggtggcagtgggtctgaagaacccacctgaattgaggagatcatgtgccatactcagctgtcatatgaagagtactggtccttaaacagccagtgaaatgaaactgaagccatataggaagtactgaagatggccatgtgagacggtggttactgtggtgcctggtgctatgcacatgacctcttccccattctcaaaccagccggttagaaaccagcttgcgatcagtctccttctgccctcctcctcctaagaggcaaaggtgccctgaggaggaattcaggctgtgggttaagcagctctgactctgaattcagctctgccacttactagcaatgtgacctggggccaggtcttcctgagcctgagtttccccacctgtaaaatgacaccttgctacagggattcttgaaaggagtagagcagaggagtgaagcgttctgcagtgtccaccatgtgattagtactggtgttagtttcaattgtcagtttctagaggacgggaactatacctgctctgattttatcacctagcatgtctgtaaaatataagagaattatatctccaggccattagatttccaaccacccagattgtacacattcctagcacagccaatcatgtcagcttatgctgaataatctttaccaactcaaagtggaagtgcaaagattccataaagaagttcaattccatctggtttgagttggtgttttaaaaaaaaaaaaattcaattccaaggctcaaaccaactcacatctccttttttactaagtttaattctgaacttcatcgtgggatttaaccaggttcctaatcatgctgcaatggccctaattccttatgagtgagattgtatcggattccatggggcatgagaatgaaaccttggcattccacagtttgactgctggtacaagtttagcatcccaaatgtgaaaatccaaaatccaaaatgctccaaaacctgaaactttttgagcactgacatgacactcaaagaaaatgctcattggagcattttgaattttagattttcagatttggaatgctcaatctgtaagtaagtatattccaaaacctaaaaaaaatctgtccaaaacacctctggtcccaagcattcaggataaggggtactcaacctgtaataaaatgacatttcctccttcaaacctaaaaaaaggaaggagtgccaggtgtggtggctcacacctgtaatcccagcactttgggaggcagaggtgggaggatcgcttgagcccagacatttgggggcagcctgggcaacatagcaagaccctcgtttctacacaaaatttaaggagttaaaaaaaaaagaaaggccgggcgcggtggttcatgcctgtaatcccagcactttgggaggccgaggcgggtggatcacgaggtcaggagatcaagaccatcctggctaacacggtgaaaccccatctctactaaaaatacaaaaaaaaaaaaaaaattagccaggcgtggtggcgggtgcctgtagttccaggctgagacaggagaatgacatgaacccgggaggtggagcttgcagtgagacgagatcacaccactgcactccagcctgggtgacagagtgagactccatctcaaaaaaaaaaaagaagaaggaagcggtggggagggactagattttccaactagtagatgaggatttcctaataaatttgggagctagtagcttttcaagctgcttaactattaccatgtcttacttacaaaattattttctccatggttcaccagattctcagagaggagaatgatgtcgctgccaagggaccctttccactcaggttcgttaatacactcacccttcaaggactcatccaaaacactcctctcccctaatgatctgaagattctagaaaaatgaaaagcgtctcctaccaaacaattagcattcgtccaggctaaaggagtttaaagtaaacattcaaagggccaactgagactctggaaaagactcagctcacagctgaagagaatctgatggcacgggcagcattgcgtggcgtagagagtacgtgttcggaaaccagagagatctgagcagaaatcccacacgggaccaagaggctgtatggctgggcctgggccactcactgagatgctgcgagtctcacttttctcatctgcaaaatagtgataaggctacttctgcagggctgctgtgaagataagaggggaaaaatatgtccagccccaagagcaatgccttgcacactgcatgtggctgagcaaaggggtgaagaatatccaatagtatagacttgcccatttatgaactaagaccaagtaattctgcccctcctccttacatggataactgatctacctttagaaggcctacaaacaggccgggcatgggggctcacgcctgtaattccagcactttgggaggccgaggcgggagaactgcttgggcccaggagtttgagactagcctaggccatgtggagagaccctatctctattttgtttaattaaaaagaaaaaaagaaggcctacaaacaataaaaatgatcaaaccgacagataagcagcaaaacagaagatgacataagaaaacgaaacttcaccgggcacagtggctcatgcctgtaatcctagcactttgggaggccgaggcgggcagatcacaggtcaggagatagagatcatcctggctaacacagtgaaacccatctctactaaaaacacaaaaaaattagccgggtgtggtggcacctgcctgtagtcccagctacttgggaggctgaggcaggataatcccttgaacctgggaggcggaggttgcagtgagccgagatcatgccactgcactccagcctgtcgacagagcgagactccgtctcaaaaaaaaaaaaaaaagaaaacaaaacttcataactcctgcagtggtggacacctgtagtcccaactacttggaagactgaggcaggaggctcacttgagctcaggagttcaagaccagcctaggcaacagagtgagactcggtctcaaaaaaaaaaaaaaaaaaaactctcaaaaaacaaacttcataattcctggacaaatccaataggtgatcattcagaagtatacctatgacttaagaagttcctaagttatgacttcatgttgttgcaaaaagaaataaagaaaaaggaaaaacagaaaaaaaagttcttaagtatcaactggttcttcaaaaccaaattaatattttggatccttgtgggcgaggcagaagagggtggggggcgagatacacaagtattgaaatctataatggcacttttctatcacataggagatgaggattacttcaaaagtacttataaaatatgcaccgtttttaaaattaacaaaagaaataaggttctatattataactattaataaacatagtgggtgcttcaaaatattggttagttgctgatatggagccaaaatgttctaatgtctcttatgtaaaccctacaactcttttattatcctagaattgtttttctaattacataagacaatatatgctcagtgaaaaaaaatgtttggggggccaggcacactagatcatgcctgtaatcccagctaccagggaggctgaggcgggaggatcacttgatcccaggatttcaaggctgcagtgaactatgatggcaccaccgtacaccagcctgagcgacagagcaacactccatctcttaaaaaaacaaaagaaacaaaacgtttaaagtttggaaagaaaaaggcaccaagaaaaaaaataattcatatagatagctaaacagacagataatatatggcccacccccggaagcttcttattaattctgtaatatgctaaatacataaagtataaaactttgcttttccacttttactttcagaactcattttcggaaataatcctcagtgttttctcacacagaagttgatcttttcctatcaaccaaaatgatgaagtattataactatgccttcaaatcaaagtctgtaacacaaataagactccaaatctacttctgctagcgtttctgaatctttccacttttaacctagactacaaataatttaaagtttcacatattgttccacgacctcaaatctaggacctgtcagactttatttgccacaggaaaggtcagtgaaagaaaagattagttcaatacttctttcagccccacgactggcactgtgctgcctcttcttaaaaaacaatgccctttgtcccccagcgcccttagtgagctagcctcattgtacactgggtccttagtattttcctaacaaaggcacgtctaatgagatatggaggttcagaggggattccctccactccaagtaggtgtcagactgacgaacgtcttagaaaaatatgtccggtctgtgtccagtcaccgttcggatgcattgaataagcatcttattcgtggcagccttctgcatgaatggctagacatcttgaggatgcctgtgtactactgtgtgccaggcaaggtgctcatgttcaaggcaagccttaaaaaaaaaattaggatttcaatgtacatttaccaaagctctggcgaggttaggtgccttgttcaaggtgtcacagttggaaatgctgtcccagccaggtgtgtgagatccacagtcccatcagctcatcctgtggtcacaacctattcacggtttgcatcagaaacgtgggaggctgttcctgggtcttacaagttccccagatatctctagaaaacgctagcccaggctgccccacggggggtcccgctgctaaggagaagtgggcacagagggaccaaggaccatgggctttcctcagcagggagggaactgcagggcagatgtccatggtggtgatgatgaagatgccttccttactatcctctatggcaggcccataacataccttccctcgcgtaatcttctcaacagcctggttattgcaggtgacaataaccaaggctctgggaaattccagccactgctccaagccacccagccgaccgatgggacttgaacctgcgcctcctggatccgggcgccctccccgcggcctcccgagccctgagtgctgccctcagccctcccttctccgcgacgcccctcgcccggttgctcgcagcacccccaaggccgctccccgaatcccccgggcgcgagggcccgggcgccagctgcccgctctgcccacgccttctcagggatcctggccctggcggccgccgcgacagacccacttacgcggatcgcggagcaggacgcccgcggcgcgcagggccgcagccatgtttgcgccgagtgaacgcattgcctgggcagcctcggcccgagtccgggctcctcccgcggcggcgcgcccaggtgtccgcccagcagtggccgagccgggtagcgatccccacgcgcgtccccagccccctgacctcgcgccctcccggcgcgcccgctcattcgctgccgggccggggcgggcgaggccaggcagagacacgcccctcgcggagagcccgccccagctgggcgccgctccctgcgtgaaaatgggcccgggggctgagctagaagcccgctccccaccaccatcgcaggtcactgcaaaacctgctggactcctagttgcgtgccctgtttgcatctgccaaactagcgaagtcaggatcctcagccatgactcagcaaataacttttttcgacgtttccattactattatttagatataaggatgcttttgcctcagttctccagtttgcctgcctagtcacaacacaagtgtgcagatcctgttttgttttgctttattttcagaatagaaaaagggattattcagtttctctgcaccctctctgtgtagcagaatttgacaggtgaaactcactgaagagcattaggaaaagtgaaggccagcctggcaagtgcatttcttggagggacggtatgatgaggtttgtctgtatcatatccgcgcaccttcccagtttagccgcccgtcccgcccccaaggtcgcacactgagatcactgggaggaacaggcgcccatttcattcctacacctccgtcagcccaccctgcctatatatgttcagtgcattgtggagtaggaaaccagcccttggtacagaaaggtctcaggcatcggtattcattgaacaaatattgagcacctactatgtgcactgggaaaacagtagtgaaaagagtagacgggggcttacatggggttaggggagacacagaaaataatcacaacatgtaatactttgaatgatggagcccttccacggcctcccctcttctttttccctctcaggacaaaagaagaatgaagcaaggtaaaagagatggggtagggtgggggaagggactaatgcaatttgaagcaggtgggtcagagtctcacacattcgagcaaaggccttatacacatttgagcaaagggggcaagccatatggaacattcagggaagatggagtctagattcagctgaaacccagttttctgtagcttaaatatgtgctactgatggaattagtttatttcttattaaagttggtcctcctgatggttataagcccaatgcaaaatgtcaaattaaatggatagcctttcatattacctacatgatcttcatatccaagcggatgtcctgagaaaagcacagtaaaacctgctccaggtatcaacccaccttccttatatgtgtggctattctctaccctcataaaaaaattatagtcttcttaagttgccctgtaaagaggtgatcttcatggataacatacttctctacctacagtctgaacccatttttgttgttgttgttgttatttgtttgttttgtatttccagtagatacagagttttgccatgttggccagactggtctcgaacttctgacctcaagtggtccacccacctcggcctcccaaagtgctgggattacaggcgtgagtcaccatgcgcggcctgagcccatttcttctaaagaaactaaattgaaaggctgcacacctcgcaatgctgtgctggcagacatgtagacaaggccagagaataaaatggccgggggggttagacgtctgagctatgaaggctcttcttgtcccctctgggaggccctggagaaagtcatcccctccatccagggtgctgggccctcctgctgggtagagataagggggcttctggtccctcccaggcaaacgctgatgattagtgacaaggcataaaggtgccaagtctcaccagtacaaaatcaatggctggcgtgggttaaatttctgtccagaaatgattatggaactagcaagacatactttattaaatattttaatgaatcagcatcatttcatttcttttattcgcatcttgcactttcatttttactgacttctttttttattttttattttttcattaattaattaattttttttgttttttttttttttagagggagtctcaccctgttgcccaggctggagtgcaatggcacgatctcggctcactgcaacctccgcctactgggttcaagtgattctcctgcctcagtctcccgagtagctgggattacaggtgctttactgacttttaaaaactcattcaaaattcctcatgtataaaacctcctggtgcacatattaagaactcatgggttataactgaaaacagaacttcattctttttccccaacagagagtaccataacaattgttattcctaatctatggcttatttcttacaaacattgaatataacagctttccaatgagtaaatttttatgttcttatgcagtgaaagcagataaaatgtgctttatgttggtccttttcaaaactggtagaaaacacagtccttaatccagaaattgtgaactctaaatacaggcttaccagaaaagcccttgaaaggctaaagaaatttgcggaaccatatgatatacataatatgaattttttctgacttaacatatttttaacaaaatgacacaccaattccattagcaaacagaaggctaaaaaggcacagtgtgtgggctaacggagataaggagcaccccaaccaggagggagagggtttgtctggggcctggtgagttcattagtgaataaagcactcacctgtcacagacaccactctgagtgcagcctgtgatcctaaataaaatgaatttgttggtttcagctcagtgcttcagggaaaggggtgggaaatctcttcattcattatttgccatgattggcacctctgagctacacaaactaaatttagattattcaactctgattccttaatcagaaaaataactggggaagggaggaatcaggaggcattcagggcaagagaaacagtggctgcatgtaacaaatggtaagctataatgattactcagagaaatctgatcaattgtccctagaatcattttacaacaaagaggccaccaaatccaggccaacatgccatgcgttttgacttgcccctcttcaccacgcagagccttcagcccaatggtggtgacgggtttattaatccatctgcccatatttcctgaccatctaccatgagcaaaacattaggtcatgtagaggataaaagagtgaaaaggaaaacaaacaacattctcaaacagctcattcgcttatgaaacaagcgtatgggagactccagtctatgtcaggcacatggcaggcactgggtgtgcagcaatgaaccggacagtccctaatttcacggaacgtaccttctagaaggcaaggcagacaatcgttttacaacaaagatgaaagacatacaacatattgtcaggtatggctagggaccagaagaaagctaaaggaggtggaggaagggagagaggccgcaactgcccaggtcagtagtgcagtcaggaccagcctctctgcaaaggtggcatttcagcagtgacctgaagggagtgagggcgttgtccggggaagggcttgcaagcagagaggccagcaagcgctggaacacatttgaggcttgtattcatttcctagggctgctggaacaaaataccacaaaccaggcaggcaaatgtgttgtcgtccagttttgaaggctagaaatgcaaaatcagggtgtcagcagggctgtgctccctctgaaacctgtaagggagaatccttccttgccttttttagctcatggcggtggcaacaatccttggcgttcctcagcttgtagatgcagcactccatcctctgcctccacagtcacagcctgtcttctcctcttggaaggacgccagtcattttggattaaaggcctactctaataacctcatcttaacctgactgcgtctgcaaagaccctgtttccaaataagttcatgtttacaggtacctgggggctaggatgtcaacatgtctgttgggggaacacaactcagccccataacaaggctgtcaaagaacagcagggaggccacatggcttgagtaggggggcggcgagaggtaggggaaccagggcggattgatgtagaactttgtaggtaatgaaaaactgtgtcttctgagtgacctccattcttcacttatactgcatgactaaatgtgcccattgtggctgggtgccgtggctcacgcctgtaatcccagcactttgggaggctgaggcgggcagatcacctgaggtcgggagtttgaggccagcctgagcaacacagagaaacccgtctctactaaaaatacaaaattagccgggcatggtggcacatgcctgtaaaccagctactgaggaggctgagacaggagaatcgcttgaacctgggaggcggaggttgtggtaggccaagattgcactgttgcactgcagcctgggcgacatgagcgaaactccatctaaaaaaaaaaaagtgcccattgtgattttttttttttttttttttagctcattcatactgggtgttttttccagggttctctgcttcctgggtggtggaagggtccctaagaggcctttctgatttgcttcttccaggacccaggggtcccaccagtcttagaccaagtttgtgtgaatatctcaacttggttgtcctgttccctgcagttgtataaattcacagccagggagtaggcattccccagagccctgggaagatggcaggcttccttgtgcttctctgggctagagagccaattttctggattacttttcacagaagtgccgggcctctgcggccctgcttcatggaggggtctggttctagctccaccttcctatggctgcatgggcattctaggagctgggcacatgatgtgttcactgtgaaaactcatggagttgcatgcttatgatgtatgcctttttctgtataaatgttatactttaatgaaacttttttttttaaggggccccttggtgcctttatctggctgggcactggctgggctcaattctccctggagcccccattcctaacctaacagctctgactttgagattctctctagcccctcccctccaattctgatacccagagatgttcctttctcacctaggattttgagggcaaatagatgtatctagtaaatctgtttataatgcggtaacaagaggtgagcagaagtttccctgataaaagtgagagagggtttcaggctaagaagatgaaggaatgctttccatcgaggaggtgtctgaacttacaataagaggactgagataggctgaatgtgcagagacagcaagaaggtggaagagcacatgagaaccaggagcaagaccttcacttggccatagcacagggtatggcgaggactaggagaaaaggctggggtcccagcccgaatgcactgagggcttggcccttcataggccagcagaggcatcaagagccatgacagtcagggaggtgagcagctgctgtggcagagaatactgagcaaacagggtgtgggtcataggacgtaataggggccaggcaaggagaccaagctggacagagtggccacaggtgaggattgaggtgtggagcagagtggcaatggaagtgaagatggcaggggagcaaatggtatggagaaggccaggcccagtggctcacacctgtaatcctagcactttggaggctgaggcgggaggattacttgagcccaggaatttaagaccagcttgggcaacatggcaaaaccccatctctacaaaaaatacaaagattagctgggcatggtggtgtgcacctgtagtcccagctactcaggaggctgaggcaggaggattgcttaagccagggaggccaaggctgcaatgagcagtgatcacgccacttgcactccagcctgagcagcagagtgggaccctgtttcaaaaaatatatttaaaattttttaattaaaaatttaatttttttaaaaaaagatatggagaagtcgagaggacaggcacaggttatggcatcttaaagataagaagcaggctggaatcaagtaactccaaggtttctggtcttcatgaggccgaaaaagagaagcacattagttagcagcagagctggtctgagacaaagctgggggctctttgtcattgctgttctcattgttttgtttctaaccacatatattttatgctgcaggaagtagaaaagacaaagaggtacagctaatttttttttttttttttagacagagtttcactcttgttgcccaggctggagggcaatggcaccatctcggctcactgcaacctccgcctcccaggttcaagcaattctcctacctcagcctcccgagtagctgggattacaggtgcctcccatcacacccagctaattttttgtatttttaatagagacagggtttcaccacattggtcaggctggtctcaaactcctgacctcaagtgatccacccgcctcagcctcccaaagtgctgggattacagacatgaaccacactgtgcctggccaaatttttttaaaaagttttagtggtcattgatatagcaatagtgattgaacctagccattcattcatcattttttcagagcctgctatgtgccttgcatagcccaccgctgcccacaagcagcttatacaccagcagagaagcagctatctaaacaaagagaaataaaaggtacagaggtctgttctgggttccatacagcagcgggaggcaaggggcagggctgtcaggacagcccccaggcagaggctgctggtgccccgtatcatttccaggaagacggggcggctgctgggggacaggccttgcaggtcaggagggcagcaagccctgtgacagcaagatgggttctgcagctgctggttggtcagtgagaagggacgatctgaaggatttagcgaggtgagtactgagtcctggaggtgggcaggggccggctcacagggagcctggtgagccagggtcaaggtctgggctgggtcctgtatgccacagactagagtagctgcaacaaggaaagttaagacaggcttctgggtcacactcacatttagcccgcaggaaaaggagtcacaataactgtaatggcttccatttattaagtgccagacatggaatcgctgcaactggcttataaagaggaggtaccaccctgttttacagatgaggaaaacagagtcacagaggtcccctgacttgcctgaatccagttagcaaggggcagagccagtatttggacccaggtatgtttggctcccaagccagggctggctccataccttcagggtgcatctcacaagagaaaaaggtgacagaaagcaggggtcaggccaggcatggtggctcacacctgtaatcccagcactttgagaggccgaggcacacacctgtaatcccagcctttgagaggccgaggcaggcttgaggtcaggagtccaagactagcctggccaatgtggcaaaaccccatttctactaaaaatacaaaaattagcctggtgtggtggtgtatgcctataatcccagctactagggaggctgaggcaggagaatcacttgaacccaggaggcagaggttgtagtgagccgagatcacaccactgcactccagcctgggcaacaaagcaagactctgtctcaaacaaaaaaaagaaggcaagcaggggtcagagagcgcctatggagttctcaccactcacccaggtgttcctgtcaccaatgtcacggatttgttagaggcactgaattatgaattcaaatttgtgcgtgaacctgaatgcacgaaggaaattcttttttaacagacatagccagagaataataggtatctacccattcccataacccagttaaatttcacttataacctttcagagttacatactgcttttttcccatttacagagaattcatcattctccttgctattttttccttcctaatagctaataacggatcatttcttcccttttgtttatgcccactcccttttgattggtcttcaaatacagagtaatgacctctgggtaaagatggggcttgaacactagggtatagtttcactctctcccaaaaaccacactgaaatgatggtagaggttttgttcatgacggtggtattttttgtttttaagcacaaacctaaaagaatgggaaaaaagaaaaagggaaccaccatggaatttttaaagtggcagcagatgaataaatacttaatgttttagcagacctgagaaaactgaatcctaagctggccatccgtattaaacaaaaaccatccagattacactagggggctcaggactggcagtcgcaggtaccactggaagtagggatgaaaggagatgctagaatgagatggacggaaagtctgttaaagcaggctgggcacgatggctcacgcctataatcctagcactttgggaggctgagacaggaggatcccttgagcccaggagtttgagaccagcctgggaaacacagggagaccctgtctcaaaaaataaataaataaataaaatcaataaaataaaattaaaaaaagagtctgttaaagcagcagattgcctagattcccaccctgcagtggagtgactgctccccccaaacccctaaagctaactagatgtttggttcctggagaggtaacagagggctatggactgcagatcccaagcacagctgagagcagggccaccacagaaaacagcttagtgaactgtactaactgaaggtgcagagacccagccctcttctttttccctccacaggaaacccaactagcctaagaagaaagacctaacagacaatggcatgggcctcccctgctaatccacctagggcagatagcctacagtaaggctcacatctattcacatgcttggagcatccaatggacattttaatctcctatcctgaattatctctgaattttcagcagataaccaagcagcacctgccatctcaagaaagcctgtaacaggaaagccagagaccaaacaaagcaggaaaaaaaaaaaaaaaaaaaaaaaaaaaaaagcaacccaacgtggaggaaactggaatgatacaggaagaaaactagaaaacttagataaaaaactaaagacagaactttctgaaaccggaataagaattttttaaaatatatttttactatggttaacagaaataaaatactcaaaggactggggaagagttgaggaaaacgccccaaattagcagcttaataaaaaagatggccaggcgcggtggctcatgcctgtattcccagcactttgggaggctgaggcaggtggatcacttgaggtcaggagttcaagaccagcctgacggacacggtgaaaccccatctctactaaaaaattatgaaaattagctgggcatggtgccatatgcctgtaatcccagctacttgggaggctgaggcaggagaattgcttgaacccggaggcagaggttgcagtgagctgagatcacgccattgcactgcactccagcctgggcaacaacagcaaaactctgtgtaaaaataaaataaagtaaaataaaataaaataaaaagataagggccaggtgtggtggctccactataatcccagcactttgggaggccaagctgagaggattgcttcaagcctggaattcaagacctgcctggacaacatagggagaccccatctctacagataattttaaaaattagctgagtgagctggcatgcacctatagtcccagctacccaggaggctgaggcaggatcacttgagcctgggaggtcgaggctgcagtgagctatgatcatgccactacactccagcttcagtgacagagtgataacttgtctcaaaaaaaaaaaaaaaaaaaaaaaagacaagaaaattgaaaagaggatttctagtatctaaatagcagttgtagaaagaacaaaaaaacagaggggagaccttcaatgaaacaatttaagaaattttttcacaactgaagggcatgactttctgtattgaaagggccaattagaatggatactctcaataaatatcatcatgaaatatcagacattgaactaagcttccagaatagacaggtcatatgtaaaggaccatatatcagaatgcttaggaattctcaataacaacaccagaaaaccaaacttcaaaattctgaaggaaaatgctttctttttattattatttttagagacagggtctcacactgtcacccaggctggagtgcagtgacacaatcatggctccctacagcctcaaactcctcagggcaaaagatcctcctgcctcagcctcccaagtagctaggattacaggtgtgtgcaccatcacacccaactaatattttaatttttttgtagcaactgggtctcgcaccagccttgccaacattgcaaaaccccgtctctactaaaaatacaaaaaattagccaggcgtggtggctcctggctgtagttccagctacttgggaggctgagacatgagaatcacttgaacctgggaggcacaggttgcagtgagccaagatggcgccactgcactccagcccgggtgacagagtgaaactccatctcaaaaaaaaaaaaaaaaggcggtctcaaacacctggcctcaagcaatcctcccaccttagcctcccaaagtgctgggattatgggcatgagtcatcgcacccagctggaaaatgctttctaacccacaattctttatggagagtatgtgaagatagatttaaaacatttttagacaagcaaggtctcaatgaatttaccttccatgaaccctttctcaaaaaactactggacagccaggtgcagtggctcaggcctataaccccagcactttgggaggccgaggcaggcggatcatctgaggtcaggagtttgagaccagcctgggcaacatggtgaagccccgtctccactaaaaacacaaataatctgggcgtggtggcagacgcctgtaatcccagctgcttgggagggtgaggcagaagaatcgtttgaacccagttggtggaggctgcagtgagccaaaatcatgccactgcactccagcctgggcaacagagtgaggcctcaactcaaaaaaaaaaaaaaaaaaaaaaaaaaaaactgctggaggatgtgctcaaccaaaatgaggatgtaaactgaaaaaatcaggaaacatagaaaacaggaaacaggatgtccagtacaaaaaaaaaaggtaaagggaacacacaggatggtaatgaaagatcccaagatgacaactatgttcctcgagggcaactcgttcagattaaagcaggcaaaggctccagaagatgggaagaagtaactgatagacaacccaatatatccaaacatcttttgtgattgaattattaaagaaaaaataagacaaatttagtatagggaaaataaaaagttgggcagaaagagaaaacaactattgtgaactatgcagccaaccaaaattataattgaactaagttggaaatatggcgacatggtttgaacgtttgtcccctccagatctcatgttgaaatgcaatctccagtgttggagggggtgcctggtgggaggtggtggtcatggggaggaatggcttggtgctcttcatgaagtgatacatgagttcttgcactgagttcacagcagatatggttgcttaaaggagtgtggcacctcccccatctcttgctccctctcatcatgggatatgctggcttcccctttgccttctgtcatgattggaagtttcctgaggcctcaccagaagcagatagcaacaccatgcttcctgtacagtctgcagaacggtaagccaaaataaaccacttttctttgtaaattacccagctgcaggtatttttttatagcaaccccaaaacagcttaatacacttggggagatgagaagggtgaacacgaatggtggggataggaaaaggaagaaatgaaatccttatatgccagagaagggcaataaataacgcctaaaactgaaaaatcaataaagtaatataagcatgttatttagcaatttggaggtaaatactgaaaaaaagctaaaacttttgaacaccttcatttctgtaagttggggtactaagacaagttttatccaatacaaacttgattttgactgtagaaactagtctttgtcccacaaacaaagtttatcaatatctcttcaaagatgttcttcacctgatcatcacattggttatgatccataaggcagaaggaaacttttcagcataagaaactgagtcattaaccagcaatttccaaatactagaaattgcagtatttgtatatcatgacatcccttttttcccagaagggctggatgaaatatacttattctatggcaattcaaaattcaagctttgaagtttctcagccctcagtgttcccatttcaactacagagattaatacaaaatcaatagagaacctacagcaataataagagaggcttaaggttgagtttagaagtaggaggaagccacctggcgactgtcaacctcactgtgcaacaacctcccctggggagcttttaaaaaataccctggtcccatttctgaaattcagattcaactggcctggggtaaggcccaaacaccattatttttaaggtccccaaatgatcccactgtgctgccaagattgcttttcacagagttgaactactctacgtattaaggacaacatttttaggaaccattacgaggcagcaaggtggcaggggctgaacggcaaggtgggaaactgggtcgcttgaaatggctgaaggacatttaagagggcaagttgatatttaagcaattgaattagcctcctgtttgtctccaaaactgagcaggtcacacaagtgccaaaggtggaggggtttttggtatgaaaagcagagagtttcagggaggagaaagtcacgtgatggaagtcctgagagggcaggggtgtttgtgagctagccatgggaatgcgggatggcatctgtgacacctgaattagggtagtaactacacagcgaagggagtgaagtccacacgcgtgaggtttgctgctcaccgtgctcagtctctcggcctgaggtcaccaccttaactcccttatccatatcctggctctcctttaatattttaaaactttgacctgtttacaccattaaaattaaggctaactgagcctaacctcttcactttaattctgataaaatgaattgcttagttgaagtcatctacagctcattcacactcttccaagtattttttatttaaagatgcaggctgaatagattataaatgcatcatttcttcctttgtttttttttttttttttgagacagtctcgctctatagcccaggctggagtgcaatggtgcaatcttggctcactgcaacctctgcctccggggttcaagcaattctcttgcctcagcctcctgggtagctgggattacaggcacctgccatcatgcctggctaacttttttatttttgtagagatggggttttaccatgttgctcaggctggtcttgaactcctgacttcagatgatctgcccgccttggtctcccaaagtggagggattacaggtgtgagccactgcacccagcctaaatgcctcattttgacctgtcatttcacttaattgcaaaacaggataaaatctaatgtgtccaacagtaacacaaaaaagattacaaaaaagatttaaccatgacccacatatctaacgttaaaaaatcattcgttctcattaccatataacgttagcaatatctactaaatttagtagtacttaatttcacatatatacatcataaaaaagataaaataattgcaaaagcatgaacgaatgtgacaaagagatgtttagctttaagaaaattaagccagcaaagagtttttacgggtgttcatttattgactgctgggaatacagcctattgagaatacatgacatgcatttggtggagaaatcaactaaatctgaaatgaagccattcagtaagcctgctgtgagttaataaggtagcacagattagatctaaggacatggtgggggcaactcaaacagccactcacaattgttattaagattccagctacaatttcttttggaacttatttattcttaattacttaggaattaccaggaaagagggaaaatcaatctgcctctttaccttaaattaatgctaagagggatactgtgaatcactaaaaaactctccccaaaattatgttcttacttcaaatcctttaaggcaattctatttttacaaattcttcaatttctatgcctcaggattattagcagctaagcagagttagaaaagattaataactgatacaaaaggctattcatttgattctagtgtttactgctgaattatactgtgttctaatatgagcagatttttatacgatattgccaatttcttcccccaagatttttgttttaattcattgatgcaataaaataaatcaaagaattcaaggtacacttaaaaggacagaaagataagttactggagtatcttacaccataatctaaaattgttgaattatacatacatataacttgaataaaatgaataacttggataaagtgagtaaaatgctgaaatgtatccctaactacagtttcatgccaggtattttccccgaactttgtttcccgaacttaagaaaaaaatggatattttttcttaagatgacaaccttaatatcacttgatgttcaggtgatttgagatagtttttatggtagtagaaagaaaaacagaaagagaaaccccaatgaaacaaaaaaaggaagattctggctttttgttttcttttttaaagagcctgttcctttcataatctttcctccacgcttctggagaaaatggttatggcgtgcaacgctggacaaatcgagggtataagcacacgtctcggatgtgatacctattcagaatccacgttaagaatcgttccaagcccaagccatatcctccatggggacatgtaccgtattttctctgtttaaaaaaagaaagaaagaaagaggagtaaatacttaagttaaaactttcatctaagacagttaaaattttccaccatgaaaggagttagctcactgtggttaagaattcaactatggccagattcagtggctcgtgcctgtaatcccagcacttaatctctatgccttcatgaaccatgcataaagaaataatttggtatgaaaaaatcaaccagggaataagtactaccctggaaagaagagatttttaaaaacttttaaaataagtcaatgtctatttataagaggaaaatgaagaagggtactagatactggtaggatcaattttttaaaactcagttgcaatcaacaagccggccgttaaacaggttttcaaatgaaattaacatataacttggccaaaacaaagctggcaatattcacacaccacattataacctgcaaactgaatatagctcattcaaataccaaagtactaccctgaattctccccttttaaaaatttcaatatatacagaacgattacagtggaaaaaaatgttgagtacttaaaaaattggttttacctgatccgtataccagtaatagggagtggggtcaatcccttcccttttataacctgccagtatttcttcactatcaaagatacgcattgagcctcccacaatctcaccaacattgggcatcaacacgtcgacctttaaatataagtgaaagaagatacacaattactatcaagcgatcagacacagcactgccctagagtttaaatgaaaattacaattaagctccaagggctaaaggagccactatgatcatgtaatattcaaatgtttacatttctctaatttaacaaagcatgtcaacttcaatcaggggagggtgaaaaaacccaacgtctttaaatattgttattctagatagagaatgaaatatttggcatgagctgtacctgattccagatgacagtccccacccccttaaaaagcaaaattattaatactctttgaaacagaaactgacagattcagtaagacgggaatcctcaggacatcgctgcatgtagaaggacttgatctccacaggaaatcgacacagcaagattggttcattaatggtgtctgtcatcagtctctcaggagcttctgggatatcctgaggtcaaacaagacttcattaacatttacaacttggatcgcaacaagacagaagcagctccttcaccctgtaccagtccttcctcctatcaattcaacagagtagaggatacacacctacccttaacccatacacatttgtgtaaagaataatttctttcaaaaagaaataaacatattcttaaaactcagttatttaatgaagcataaaagatctgtctccctttacagcatatctcaagcaccatgctgtttgatgaaggaaaataaaaaaaaaaacaaaaacaaaagccagccccaagctgtgactagacacagctcagtatttttctcagtggcccgttttgtctagctctgaagcaaatgaggtccacttagtcccgtaaggcatacggtaatcatgaatgctccagaacatcattgatctacacacagagtatattactaatgacacttatctttaaactctcctgttatctacccttctttcctgttgtaatcaatcagttatgccttcgatgacagacacaatcataagacaaataaccaatgtcaaactggtaagtgtaagcacacctggaatagttacccaaacaatgttagatgatgacttaagcgcatcagtttctctctcaaaacatccttctataccacacataaattaaagttaacacagaagttaaaactgacaactctcgtcccagtaaaaatggattgagagaactggagaagactcatagatttgtttaatgaagaagtgaaatggaggtagcaatcacctagcacacctgttttcaagctccaggctctggagcccttgcgtcctcggagacgccgagaggtaacaggagatgagtgggagagctctagtctctcagcttgcatctgctttacacagcggggttctgcataagatttagttaggggaaaacaggtcttatttcataccccccaaagcctgagggtcatgtatccactctagtgtcctcatgtgtgtggaacagtagcaatgtatagtaaatgctgacaggctccccctgccattgtcctgcctaggcatttagctccggtagtccccacaatcttgcaaaacagatgttacttccaaggtagagataaggaacctgagagggggtcactggtcttcagttacacagcacaaaagaaaagaggtgggagctaagcccacctggggggccttctgactccacagcttgtgttctttccactcaactacactattttactaagtattaggaacactaaaagtatgcaagttctcaatacaaaattttgtcattatacatcataaactgaattcataggctgggcacagtgtggctcatgcctataatctcaacactcgggaggccgaggtgagaggactgctcgaggccaggagtttgagaccagcccagtcaacacagcaatacctccatctctttaaaaaaaaaaaaccaaaaaaccaaactgaattcacagaaacaagagtgctttacatagacccagtatattgtttcacctattaattccttctaaaacccaaaactagttagcagcatctacacacatttcaactgtaaaacaattagatgtgcaaatattatgtaagtaatggttaaatgcacaggaaagagggcctagcatagtcttggaaacttgagccagatgcagtggctcacgcctgtaatcccaatactttggaaagctggggtgggaggactgcttgagccaaggagtttgagaccagcccgggcaacatagggagacgccatctctacaaataataaaaaattagctgggcatggtggctcacacctgtaatcccagcacttttggaggctgatgtaggaggaacacttgaactctggagttcaaggttgtagccagctatgatcgcaccaatgcattccagcctggacgacagatggagatgctgtcccaaataaagaaaatttgcaacccaagtgcatgctgggagagtggttctcaggcaaaaccgaaatgctaagtttacctggggcactaggctaccttctccaagaccttctctcttggttttgcatttttaaccaatggctatcttctttctcgccttccacattaagaagttttaaatcactgttttgggggaggggatgaacctctttttaaaagcacaagatacattctccagaaaaaaaaaaaaaatatatatatatatatatatctatataccaacattttgcatgtgatttcaaaggcttcacaaccttctaaagcactcctaccagcctagagaatgataaagagagcttataagctgtggccaaggaagaacaatgaaggaagagggaagaggcaaagcatgagacatgaaggcagcttagaaactcacacttggccagaagcggtggctcacgcctataatcccagcactttgggaggctgaggtgggcagatcacgaggtcaagagatcgagaccatcctggccaacatggtgaaaccctgtctctactaaaaataaaaaaattagctgggcatggtggtgtgcgcctgtagtcccagctactcgggaggctgaggcaggagaatcgcttgaatccaggaggcggaggttgcagtgagccgagatctgagatcatgccactgcactccgtaggcgacagagcgagactccgtctcaaaaaaaaaaaaaaaaaagaaaaaaaaagaaactcacttacgcttactgggtggtacagaacaggcactgtcctaaggctgactctgttaactcagcgaatctgcaggcaacccaagaagcaggtcctgctgttaccatttatttgaggacaggcagatgccacccatgttactagttcattaaccagaagaagagaattggagcccaatcccaccttggaaacaatgagagaaagggatacatacttctccaaattcatagaaagttccatcttctttctttacatcatgttcttttagccaaacgatagcatctgaatagttcatccgtttgaaaggccgtttggggggctgaaagttctacagaagaaaggaaaaatataatgtgtatatatacataaatataaacattaacactaaaatttccattaaaaaactattataaagtattacttcagtgaggtgtggtggctcatgcctgtaatcccagcattttgggaggctgaggtgggcagatcacttgaggtcaggagtttgggaccagcctggccaacacggtaaaaccccatctctactaaaaatacaacaattagctgggggtggtggtgggctcctgtagtcccagctactcaggaggctgaggcagaatcgcttgaagctgggaggcagaggttgcagtgagcagagatcgcgccactgtacttcagcctggcgacagagtgagactctgtctcaaaaaaaaaatatatatatatatatatatatatataacttcagactagaaaactatgtagacattcctaaaatggaaaacatgagcctgttatataactgaaaacattataaaattattgacagtgactaacatcaaattctagtcttcaaaataattagtcacttatttcagctcaccaagccatcaaatctacaaaaactgagggtgaagacttcattgtcttccaaaaaaggactgtgactttttctttccataaacactgcacctaccgggttgagctcatgcactatgctccctgcaggtgacttcaatattcgatctaccacatcacaaaccaagtcctccaaccggttcaggaggtcgtcaaaagtcaggaaaggacactcagcttccacgtgagtgtacctgaagaacgagacaatagctcagcactgcttttctcctgcactggttttttatccagcaaggcttttaacattgggaagctgtccataaaatgccaacaatgctaccaattcccaactttgcaaattagctgtggactcccctcttctccactgagtagcaatttcttgtttgctcctttatatataaaagatcaagtcaaagtgaaaaaagagaacttagctacgatctaaggtggcaaaactttgttatatgttcttccattaaccacttaatatatcagttggttttttttaaaacataaacataatttacctacactaagatttcttctctaaagatattacctagaaagaaataaaacaaaaagacaacttcatactcagccaggtgccttcgtgttctggactgctctgcccggtatgactgagcaatacaaaaaacatctcccagggctgggaggcaggtctccaagtacaactgagaggattgagtcaaaaatgcctcttccccaaaatagtcaagcttgaagagtgtggcaccaccttctacttgtgtttgcactaatgttggaggagtaacctgttcaaatgcaaagaaggaataaatcaatgctatcgtgagcaccactattcaagtttcaaaacggcaaaaaacatattctttgcaaaagctgacgaatgcatacttacttcatagtaccccctatcaaagaagtgatctctaaagcacctggtgaccatggatcgtgcttttaggattttggacatgttttctcctcggatcatcatgtgtctgttgttgagctggacatcaacgtcagactcctcattgatcaggttgtcagctcctccagcaggggccaacccaattagttcccagaagtcacaactcagctcatggccacctggagcctgcattttttaaaagtggggtccagagaaagagggaaaaggaaataaaaaattaacagtattgaggattttaatttatgtcaaagttttggtaagctgagatttttaagaacctcctaattctcagctttagtttagttttatattgatatttttaccaatgttctttctggataaatacacactcacatacacacaaatatcttttttttttttttttgagacggagtctcactctgtcgcccaggctggagtgcagtgacgcaatcttggctcacagcaacctccgcctcctgggttcaagcgattctcctacctcagcctcccgagcagctgggattacaggcgcccaccaccacgtctggctaatttttgtatatttagtagagacggggtttcaccatgttggcaaaactggtctcgatctcctgacctcgtgatccgcccgcctcggcctcccaaagtgctgggattacaggcatgagccaccatgcgcagcctgtgcgtttccatttttaaaagatatttgtgtctgggcacggtggctcactgaggcgggtggataacgaggtcaggaaatcaagaccatcctggccaacaaggtgaaaccccatctctactaaaaatacaaaatattagccaggcatggtggcgcacgcctatagtcccagctactcaggagaatcgcttgaacctgggaggcagaggttgtggtgagtggagatcgcaccactgcattccagcctgcgcaacaagagcgaaactccgtctcaaaaaaaaaaaaaaaaaaaaacaataaaaacaggctcaaattctaataagaaattctctgaacatatttaggtgggttgttaagtttttatttccatctggctgaaaagtaattcatatatctacagcacagtggctatattatagcccatgaggatgattcaggaattccgtaaggctggaaatcattgtattctttttatcacctgagttgtacaatgtacatatttcactggaaaaggcatagtgaatttgacatgtacttcacatttattgtatttatatgctgtgatggttaatattaagagtcaacctgattggaatgaaggatacaaagtattttctgggtgtatctgggtgttgccagagaagattaacatttaagtcagtggtctgggagaggcagacccaccctcaatgtgggtgggcaccacccaatcagctaccagcctggctagaaaaagcaagaggaagaaggtggaagagcagacttgctaggtcttccagccttcatcttcctccggtgctggatgcttcctgtcattgaacatcagactccaagttcctcagcttttggactcttggacttacaccagttctttgacaggggctcctgggcctttggccacagactgaaggctgccctgtcggcttccctacttttgaggcttttgaacttggactcagccactactggcttccttgctccacagcttgcagatggcctatcgtgggacttcatcttgtgatcttgtgagccaattctccttaaaaactccctttcacatatacatctatcctactagttctgtccctctgaagaaccctaatacatatgccaaatgtacaaacaaagacactggaaaacaaaccaataaataaactattcattcacccagtgcgaaactcaatccactcacctgcttgccctttggggtaagatttagcattccatacactgcaacactgctctccgtggacaagagaactccattgtagcactgacactataaaaaggtcaaagctcaaatttagttattcacattgatttaaaaattctaccatatagaaagttaaagggattgtttacaaacaagttatctgatcaaatactagtaaaataaagagtgagatggccactgattcttaatattaaaatagatatttttgtggaagacagaggtttatctatatatagacatatacatgtaaatatatacatatacatgtaaatacacattttacatacatggataaatgacactgacccacatcacttaaaaatatctggacagtttatttatttatttttaaaaatctagactattaaagtaacatacaggttaggcacagtggttcatgcctgtaatcccatgaaggaggctaagttgagaggctcactggagcccaggagttcaagaccagcctggacaacaaagggagagataaataaaataaaaattggctgggtgtggtggttcttgcctatagtcctaactactcgggaggctgaggtgggagaattgcttgggcctgggaagtcgaggctgcaatgagctatgatgatgccactgtactctttctgagaaaccctgtgtctcaaaacaacaaacaaacaaacaaaaccatacagagcccatctacactataatcacttcttactaaagtcattaggaaaaaactgatggggaactttaaaaggaagaagtcaggctgccaacacctgaacccactagtcataaaaaagacaactggccgggcacggcggctcacacctgtaatcccagcactttcggaggccgaggcgggtggatcacctgaggtcaggagttcaagaccagcctggccaacatggcaaaaacctgtctctactaaaaatacaaaagttagctgggtatggtggcatgcacctgtagtcccagctactcgggaggctgaagcaagagaatcacttgaatctgggaggcagaggttgcactaagctgagatcacgccactgcactccagcatgggtgacagagcgagactctgtctcaaataaaaaaaagaaaaagacaaccacaccttacatgcctcttgacgtgatgcaactaaaagaacacagctttgcccatgaagtagttgtgccaaaaaactgaacctaatcagacctaacctccaatttataaaaaatgcagacactagaagaacatgctaaaggacaccacaaggatgcaaacaaccaaatccataatgtgagaagttccacaggacaatccaccagggttttcccaagaaatacatagtaatgggtggggagagggggcgggttgcaaaagaagagagaatgcaaagagagcagcagagttataaagaaaatttcaaagtcatatcactaaacgcagcatgttagtcttgtcagaatcctcgttcaaatcaatcaactataaaaaggcagtacgaactgataacaagaatctggatattagatgatatttagtagttgtattaatttggtggagggtgtgataatagtaggtgactattatctttttttttttttttttttgagacaaggtttcactctgttgcccaggctggaaggtggtggcatcatcttggctcactgcaacctctgcctccctggctcaagagatcctcccacctcagcctcctgagtagctgagactacagatatgcaccaccacacctggctagtttttgtattttttgtagagataggatttcaccatgttgccaggctggtctcaaactcctgggctcaagcagtctgcccacttcagcctcccaaagtgccgagattacaggcatgagccaccatgcccagccacattatttttcttagagatgcataagcatgtgtaattaaataaaatgatatgatgtctgaggggcagtatcataccaggattagccatatataggtggttacagaagctgggtgatgggcatttgatgattttttatatggttctattttgtaatgtgctggaaattttccacaaaagttttctccctctagccttattaaggtataataaacaaataaaaattgcatgtttatggtatacaatgtgatgttttgattcattgacattcactgtcgacataataaatgttttaaataaatgtatacaaaacaataaaggaatctactgaaaacatctaattttcaggcataaataagagaaaatatttaccaactcatccgccaagacacactgaagataacctgtaccatctcgcaacaccagaaacattaaattctttcctaaaaaatgagaaataataatttaggcagactgttctcaaggcattaaattttatatatatatataattttaaagatagggtctcacttcgtcacccaggctagagtgcagtggcacaatcacagctcgctgcagcctctacctcctgggctcaagcaaacctctcaccttaccctcccagatagctgggactacaggcacatgccaccacacctggctaattattttgtagtgacaagggtctcactgagttgcccagactggtctcaagctcctgggctcaagcaatcctcctacctcagcctcccaaagcgctgatattacaggtgtgagccactgcacccagccatgacttaatcttatctaaaggaaactccaaggttaaacattcaagttcagacctcccacatggctccctgcccctgaagtacccactggtaataccactactcagtatttgtaaaatattttattttcaatgtattggactttcaaatcctacatgatccccaagatccacacaaccaggggaaagcaggacagaaggcaacatgagttaagggattatgccttatctacccttgagtcccctgcaatgcctggggtagtactgtgcactcggtgatacataaatgttcttgaacaaaatcactttttcttatttatgtcctaaaggtccaattactgaaatccgcttaaaacatttcatttgtatttttgtcccctccaccgtcgcttttttttcagatggagtttcacttttgtcgcccaggctagagtgcaatggcatgatctcggctcactgcaacctctgcctcccaggttcaagtgcttctcctgcctcagcctctagagtagctgggattacaggtgctcacaaccacacccagctaatttttgtatttttattagagaagaggtttcaccatgttggccaggctggtcttgaactcctgacctcaggcgatccacccgccttggcctcccgaagtactgggattataggcgtgagccaccgcacctggcctgtcccacttttcaatgaaagatttgctaatcccttacaataaatagtaaaagtgacatgtttatatattataaaatatataataaaaggggaaagaggaaacaaaatgtcagaaccaagggagaatgcaaatatactgtttataagagtcaaaactatggccaagtttcagactcagatgtcaacctcctatagtaacatcccttgattttcactaaataattaaaactcaacttgacaaatatttactggacgcatcttcatcactataattgctaaccattaaaagagcatttaaaaatttttatactttcaatagtcattttaaacaagaacaaatttaagatataaatcactctatcctttaaagccaggtgaggtgctatgtgcctgtaatcccagctgctcaggaggctgaggcaggaggatggctggggggagttcaagtctagccagcataccaaaaaaaaaaagagggccgggcgcagcggctcatacctgtaatcccagcactttgggaggccaagacagtggatcacctgaggccaggagttccagagcagacgggccaacatggtgaaacaccgtctctactaaaattacaaaaatcagccaggtgtggtggcaggtacctgtgataacagctactcaggaggctgaggcaggagaattgcttgaacctgagaggcggaggttgcagtgagccgagatagcaccactgcactccagcctgggcaacaaagtgagactgtgtctaagaaaaaaagggggagagaaaaaaacccctgcaaatctttgtatgtttttcttcatctaagagcagggatatttaaacattaaaaagaaggaaaagctttgccatttaccttgcctgcgcagcctgtggacccagccaaacacctttactctttggcctctatatccttctaacgcaccaatcttcacctgtcaaattgaaataaacaacatttgttcaataatgtcatttatacacaccaactttttcactaatattaggcagacggtagtaagtgttaaaaatcacaaatggtgcaaaactggagacagcccctctactgcagctcagaaccaaacgcatttcactgtattggcatggtttaaaacaaaacaaaaaaaaatccaagtcttctttcttaatgtaaaactgataatgagaaacacccagaagaatttcagatattgctagataaaattaattaataaatgaattcctttgtcataagtggagcacttgcttcccacaacagcaacaatcccagtccacatgaagccttttccatgaccccacagttcttcaataccttccagaacatggtacttaaaaggctagcttttgtttgggggatgaaggagagaggagatgagtagaggaaggggctgttgcatgtggccaaaaaaccccagctccatcactaaggaaataatacaaaaattcatcagcaataagaactactggaaatctggctgggcgtggtggctcaagcctgtaatcccagcactttgggaggctaaggagggcagatcacctgaggtcaggagtttgagactagtctggccaacacggtgaaaccccatctctactaaaaatacaaaaattagccaggcgtggtggcaggcacctgtaatcccagctacttgggagtctgaggcaggaggatcacttgaacccgggaggcggaggttgcaatgagctgagatctccccactgcactccagcctgggtgacaagagtgaaactctgtctcataaataaataaataataaaataaaataagaactactggaaatcaaaccattttcattcatagtccagcaatctatttgggttccagaaagaacagaagaagagtgaatctaatttcacaattcacaaacttttactctatttaaataaaacatgaaaatcatagatttcaacctcttcattttataagcaaactgacactagagagggttaaatcacttgaccaacatcatgaagcgtagccaggcctgggtcccccatctgctggcattcagttgggacagaattcattcaacatgcatttacttaactgtgtaataaaatgaacccctaaagaactagcctcataactctaaaacattatttctctatgtcccttctgaaaggaaagtaggccaggcatggtggctcacgcctgtattcccagcactttgggaggctgaggtgggaggatcccttgagcccaggagtttgaaaccagcccgggcaatatgggagactgtttctacaaaaattaaaaataaataaaagttagccaggtgtggtggtgcatgcctgtggtcccccctacttgggaggatcgttagagcccaggaggcagaggttgcagtgagcagaaactgcaccactgcactccagcctgagcaacagagcaagaccctgtctcaaaataaataaattaaaatttaaaattaagaaataaaaaataaaaggaaagtaggccgggcgcagtggctcacgcctgtaatcccagcactttgggaggtcgaggtgggcagatcacgagatcgggagatcaagaccatcctggctaacacggtgaaaccccgtctctaccaaaaatacaaaacattagccgggcgtggtggcgggcgcctgtagtcccagctactcgggaggctgaggcaggagaatggcgtgaacccgggaggcggagcttgcagtgagctgagattgaaccactgcactccagcctgggcgacagagcaagactccgtctcaaaaataaataaataaataaataaatggaaagtaaaaacaaaatgtaaaggaacaaaccatgtgacatgcccctcatacacagaaataatgatctgatgtagccaagtccacggtatttgaaaagataaacaaacttacacattttggctctgggagacttggatcatttttaatggtaatcttctttgcttcttccaggttcttttctcttcgtaaactatcttctgcctaattttaatgatgaagcagtttgttaacatggttgccagagttctaactttaacaacgttcacgatggcaaggtcaggactcacctctttcttttcccgggattcactcttcatttgttccctatgccacatctttttaatgttcttcaactgtgatttagaaataacattccacctctcattttctttttgtgaatctacgtaaatggtaggaaatggttctttccctactgtcatcaaagccttgggtagggaggagagaaaagacagttcttgaacattgtacaatacttaaaatcaaaataacatctcaagtataaggcaactggaacaatctaagcataaagaccccaacagccaaaagctgatattggcacagtgactggttgaacatttaagaagcacactggttggctgggcgcggtggctcacgcctgtaatcccagcactttggaaggccgaggtgggtgaggtcaggagatcgagaccatcctggctaacatggtgaaaccccgtctctactaaaaatacaaaaaaattagccaggtgtggtggcaggcacctgtagtcccagctactcgggaggctgaggcaggagaatggcgtgaacctgggaggcggagcttgcagtgagccaagatcgtgccactgcactccagcctgggcaacagagcgagactctgtctcaagagaaaaaaaaaaaaaaaaagaagcacactggttaaagctgaagctctgaggtcctctcacaaacaattacagcaagttcgggtatacacgatacagttccccaggaaaagcagactataagcaacagatcttaagtggctgtagcaaccagcacaggtacaaggacaacagaagagacacctgacagcaaaactcaactgcaagtgacatctaaaaggttagttctctgtgagaaatcagagaagtgtcagacatttttgaaactttcaacaaaacaatggttaagaacacaaaaagcggccgggtgcagtggctcaggcctgtaatcccagcattctggggggccgaggagggaggatcaccaggtcaggagatcgagaccatcctggctaacacagtgaaaccctgtctctactaaaaatacaaaaaattagccgggtgtggtggcgggcgcctgtagagcttgcagtgagctgagatggcaccactgcactccagcctgggcgacagagagagactctgtctcaaaaaaaaaaaaaaaaaaaaaaaaaaaagagcacaaaaagctaaactcatttaatctgaaaaactcccccatgtagaatacctcttttccccaatgggacatatcaagcattgctgtgttatatatcatttgataaaatgtattgtttgtagtttttaaaaaatagttcaaagtacataaaagatgaatattttaaagcctcaaataatctttcaaaatctcttccaagttattgaatcaaacaagaaatgcagtgaattattctctgttgcaagatctgcagcctgcaaaaacggactttttctcagttctacgactgctgcagagaaggagggaatctgaggccgggcatggtggctcacacctgtaatcccagcactttgtgaggccgaggtgggcggatcacgaggtcaggagatcgagaccatcctggctaacatggtgaaaccccgtctccgctaaaaatacaaaaaattagccgggtgtggtggcgggcacctgtagtcccagctactcaggaggctgaggcaggagaatggcgtgaacctgggaggcggagcttgcagtgagccgagatcgcaccactgcactccagcctgggtgacaagagcaagactccgtctcaaaaaaaaaaaaaaaaaaaaaatagagaaggaaggaatctggatcttttgaaaacattcaagggctgggcgtggtggctcacgcctataatcctagcactttgggaggccgaggtgggcggatcatgaggtcaggagttcgagaccagcctggccaatatgatgaaaccctgtctctactaaaaatacaaaaattggccaggtgtggtggcacacgcctgtggtcccagctactcgggaggctgaggcagaagaatctcttgaatccgggaggcagaggttgcagtgagctgagattgcaccactgcactccagcctgggtgacagtgtgagactccttttcaaaaaaaaaaaaaagaaaaaaaagaaaacattcaatagttcatccttttaacaactagacattgtaagaatacatgtaggggccaggcgcagtggcacacgcctgtaatcccagcactttaggaggccgaggtgagtggatcacctgagctcaagagttcgagaccagcctggccaacacggtgaaacaccatctctactagaaataaaaaaaaaaaaaagaaattagccaggcatggtggcgagtgcctataatcccagctactcaggacgctgaggcagggagaattgcttgaacccagaaggcagaggttgcagtgagccgagatcatgccactgcactccagcctgggcaacaagaacaaaactctgtctcaaaaaaaaaaaaaaaaagatagccattgatgaaaatgcaaaaccaagagagaaggtcccatgaatacatgtaggtcgttcggaattcacttattacccgacaatctgtactgatccctccttttgtatcattgaaattgaaagagccaaactatcagttcccaaatcagaatgctacacttttgttaacagtgacattctgttgttaacagtgacattctgcaaacgttcatctaaacggtgttgtcagttttcaggagctgcaaaacgaggcacccgataatccagaaatgaaagatttccccttaagagtggttaaaaagtaaaacccagccaggagtggcggctcacacctgtagccccagcactttgggaggccaaggcagcaggattgcttaagcccaggagtttaagaccagcctgggaaacataatgagatctcgtatctacaaataagaaacaaattaaccgcgtgtggtgacatgcccctgtggtccgagctacttggaaggctgaggtgggaggatcccttaagcccaggaggttgaagctgcagtgagccatgaatgcgctactgcactccagcctgggcaacaaattaagatcctgtctcagaaaaataaataaataagttaaattaaaaacaagtacccatgtatgacacaccaaagtttataaccatatggtatgacctaaaagagaggagaatgctcccagattaggacttgatagtaactataaatgttgtaacacagttaacaaaaaaaggggatgcacagaaaaaggagtgtcaaggcactgcttttcctaatacagttcaaagaaggaacttttttgttgttgtcgtccaggctgcagagcagtgatgcaatcacggctcactgcagcctcaacctcctgggctcaagtaatccccctatctcagtctcccgagtagctggggccacaggtgcataccataccaccatgcctggctaatttttttttttttttttttttggtagttggctgagtgtgatggctcactcctataaacccagcactttgggagggttaatatcctgtctctatttattttttaaattaaatttattaaaaaatttttaagaagttaaattttttgtagagatgagggtcttatcatgttgcccaggctgttctcaaactcctgggctcaagcagtcctccagcctcagcctcccaaagtgctgggattacaaacgtgaggcaccaaagcccagacccaaggaaggaacttttaaccatcttccttatgtggcagttatagccaatggattctagcatatgagttcaacagctaagtccatggtctattttaagaaggttgtcttaggccacactttactctgatataatcaactacctaacacccatgttgtgagtccaagccctttttttgttttttcttctgagacagggtctcaggctagagtgcagtggcgcaatggtggctcactgcaacctccaccttccaggctaaagaaatcctcacctcagtctccggagtagctgggaccacaggcacgcaccaccatgctgggctaatttttatgttttttgtagagccaggatttcaccaagttgcccaagctggtctcaaactcctgcgctgaagcaatccacctgccccggcctcccaaagtgttgagattataggcgtgagccaccacaccaggcctgagtccaagctcttgacaaacccctttgagaatgagctaaactcattcaaggattctagatcctgagaaataacagcactgttaattcattaacagaatgttaataaattggcattctagcttgaagctccagactcatgagtcagctctgacaaatgaatccattcttggtggtcttggagtcaaatctcaggatcacactctggattgtggtaaattcaccaaaagccctctcaggagccccctggtcatgagctcactgtaactgaggaaaggtaacttttatctttacaagaattgaaaacccagcaatctgactcaatggagagaaaaattccaagaagcaatgccatgtggtaagaaagaagagaccttttttcaaaatgttaaaaagtaagtttagactttgatcatctaacaatcttaaagtcacatatctgtatgcattccttactttcccttttctgaaaattctctttggaacctagtgtttgaaattaagttcttggcaagtcacaagaaaattgacataactcattaataaatgcagtctcattttcctaatgagaagagactctacctttagacctgttttaaatggtttctccttggttccatctcccgtggcatcgcttccctctcggtcagagacgtacagctctgctgtttgacaaaatgagggtaagttatggtctggccattaactattagtcaccttactactttattcattccttatctttgtaaacagaacaagcatcgattaataaaaattgaggtccataagtaattaatatcctagttatttccccactccatttcaataacatccatctcataaaaacattagttaataatccaggttttcaaaatgaactctgatcattttaatttgtgatatttattctatctaattgggcacccaaaaataaaatatgggctttgaagttgatcagacatacgctggaatgttggattttgtaccttaaaaggcagggtgactctggagaatttacttaacctttctgagcttatttctttacctataaaataggaaaaacaatccccatcttgaaaggctgtgctgaggatgaaataaaataacacatacaaatcagatatcccagtgccagtttttgtagagatggcaaataaacaccagctccctctggactttaaaggaaacagaagctctgaggttagaaaatttcagaaggcctcacaactagtaggtctgaacagttaacatccatccaggtctctctctttttttttttttttttcctactgcacagtatggtctccccggaaacctcaataaaaaaatgagggtgggagaaaaacaactagaatcctaaagccccttcctgacgatcactttgaagaactgcaggagtaggggctaccctgtgtctgaacccgtcccagcgcctgagtctcagcgcaatcgggaggtttcgcagcggggcaggggaagggcccggagccaccgccatcgcagcccgggggaacgacggactcggggaagcccggcctggcccttcaagtcccgggcccagcaaaggccagcaccctccctccctccctccctgcaatcggtccccaaacattcgcggggcgcccactctggtaggcactaaggaaagcgccgaaacccgactggagcagagttcctgccccaggcagggaacaccgcgccatacactgagtctcacccacctagcaccatgcctgcagtggccctggtcacctccaaggacacagactgcaacaccgacgccgtcttatgactccaacgtgcaccggcggtttccgcgattccggcgttgcatcagagagcgtagatctgagggcgcctgcgagaatcggccgagcgccgcggttccattggttacgagaggtgggcgagcggcgccggggccgccatctttggtgagggcagaggcaacttccggatccagagacgccccgccccacgcgtttgtgcagctcggaaggcgctgcctgtcccggagctccgcggccctggagaccctggcacagtgtcacttttgcacccttccttccccgcctccccaactttcctttctgaatcttccaattccgccccagctggaggcgtgcgggtcctcttgcaaaccagaccaaggatgtcgccccgatccccagatggtggaggctggttgagttcatgtcaccagcaaacaccgcgccagctgcgagacggggtgcgcggcggtggaggggacgcagcgggttgcgtaaacttccttttttttttttttttttttgagacggagtctcgctctgtcacccaggctggagtgcagtggcgcgatctcggctcaccgcaccctccacctcccgggttcaagcgattcttctgcctcagcctcccgagtagctgggattacaggcctgtgccaccatgcccagctaatttttgtatttttagtaaagacggggtttcaccatcttagtcaagctggtctcgaactcctgaccttgtgatccgcccacctcggcctcccaaagtgctgggattacaggcgtgagccatcgcgcccggccagatgcgttaactttctaaactccgtgagccagcgtccctcggtgttcaggagaggagctatggtatatgttcatttaaaattgtaaggattaccgttaggaaggccataataatgtggtggaaagaacgagggcttcggaatacaaacctgggttctgccttttactaaccgtgtgtcttcagataaattacctaaactgaatgagcttcattcagcgagttgggaccgattgcagggagggagggagggtcctggcccttgctgggcccgggacttgaagggccaggccgggcttccccgagtccgttgttccccgggctgcgatggcggtggctccggcccctgcccctgccccgctgcgaaacatcccgattgcgccgagagtcaggcgctgagaggggtttatctgtgtcttcagataaattacctaatctgaatgagcttcagtttttctatttgtgaaagatgatataaattcactgcccgggcatgtaagaggtgctaataaagggtctgtcatcattttcaacttttttttacttttttggtgggctttttttttttttggagactgggtcttctctgttgctcaggctggagtgcagtggtgctatcatagctcacggcagcctcgaactcctgggctcaagtgagcctcccacttaagcctcccaagtagctgggactataggtgcacgccaccacgcctggcttattttatttttatttttgtggagatgggggaggggtctccctgtgtcgcccaggctggtctccaacttctgggatcaagtgatcctcctgcctcagcctcccaaagtgctggtcttacaggcgtgagctaccacgcccagcccattctcaatttagtggaataccagagtttgtccctgaagcaaaagaaaaccttttttttatgagaggtcctcaaaaaaataactctatatataggttcagggcccatcaagaatatgaaccaagtccgggcacagtggctcatgattgttatcaatcccagcaccttgggaggttgaggcgggtggatcacttgaggtcaggagttggagaccagtctggccaacatggtgaaaccccgtgtctactcaaaatacaaaaattagccgggcgtggtggcacgcgccagtaatcccggttactcaggaggctgaggcaagaaaatcacttgaacccaggaggcggaggttgcagtgagctgagatcgtgccactgcactccagtctgggtaacagagtgagactccatctcaaaaaaaaaaaaaaaaaaaagtaccaaatactattcctaaggaatatttcacccaattttatgaactttcccttttcctcttggctgaatgttttctgttggctcatggattagtatcaattgctacaaagcaaattttcccaaaccttagcagcttaaaaccccgaacatttattaccttagcagtttcttttgagacagtctcagttctgtcgcccaggctggagtgcagtggcgcgatctcagctcactgcaacctccgcctaccagattcaagagattctcctgcctcagcctcccgaggagctgggattacagacgtgtgccactacgcccagctaatttttgtattttgagtagacatgaggtttcaccatgttgtccaggctggtcttgaactcctgacctcaagtgatctgcttgcctcggcctcccaaaatgctgggattacaggcctgagccaccatgccaggccctaccttgcacagtttctgatggtcaggaataaggtagtgggttagctggaggttctggctcaggtctctcatgaatcatgctgagggcagggtctgtagtcatccgaaggcttgggtgggtggggatctgcctccaggctcactcacaagctgtggtcagaaaacctttccttgccaggtgggctcccgatagagctgctaatgacagccgctgacttcacctaaagcaagtgatcagagagagagaatattagttaccttttattttataataaattaccccaaaacatcaaatggcatttgttatctcacatttctgtggaataggtatctgggcacggtttagctgaggactcagagctgagtccttccagaggctgcagtcagcttaagttgagattcttaagtctcacctggagtggatccccttccacacacactcaggtgggtgttggccagaggtctccctcaattctttccacacgggcctcttgcttggctaaagccagcaaccaagatggaagttagaacctttagttgcctaatctcacaagggatatatcccaatacttttgccatattcgattaattaggatcaagtcacttggtccagcatacactcaaaggaagggtattacacactggcatggatgccagcagctgggaatcatgggccatcttagaaagctccccactgcagtgaccaaaactgaggctgcagtgccttttctaacctgacttgttaggtgaaatgtcattgtctctgccatattctactggtcacacagaccagccctggaggtgaatgccaggaggtgttgctcactgggtaccatcttagaggctgcccaccatagcctgtccagatgaatttctccacttcatcctgctccgccccagaggctgactcatgtgaaccacatcaatgggctccctcgttctctgactcctggtcagctgcagccaatggggaacacttgtggaagaacagaggtgggatgtgaggttggggtccttattcccgtagctcctcattgtaggctggctgcatcctcacttgagggccaccgctcctgccaggtggcactgagagattcatctgaactgcccttggtgaatttagtttcatctgatcgttaaaactgaatttactggccaggcacggtggctcacctttgtaatcccagcactttgggaggctgaggcgggcagatcacttgaggccaggagttcgagaccagcctaggcaacatggcaaaaccccgtctctattaaaaatacaaaaattatctgggtgtggtggcatgctcctgtaatctagctactcaggaagctgaggcaggagagttgcttgaacctgggaggtggaagttccagtgagccaagatcaggccactgcattccagccttggtgacagagtgagattctgtctcaaagaaaaaaaaaaaaaaagtgaatttacaaagcaacattctgttgtgaaataaaaagtgtacataggactgtgcaagcaggttgtacaagagggtcatttaaattcctacccccgcctcagtctacacctatagactcataggatttctctatgtcaagttagtgcaggatggaaaaaatgggcctagtgttgacatctgcataatatgctggcacatgccagatatgaacagccattctactctagccttacttaggagaaaccctaaaaagacagtggggagggtgggcaaggtggctcacacctgtgatcccagcactttgggaggccgaggcgggctgatcacctgaggtcaggagtttgagaccagcctggccaacatggcgaaaccccatctttactaaaagtacaaaaattagctgggcatggtggcaggcgcctgtaatcccagctactcagggggctgaagcaggagaatcgcttgaacccgggaggcggaggttgtagtgagcctagatcacgccagtgcattccagcctgggcgacaagaaggagactccgtcacaaaaaaaaaaaaagaaagaaagaaaagaaaaagaaaaaaagaaaaaaaagaaaaaaaaagaagtggtgaagggaagtcatctcagatggtggaactctgagcactgtgcctggttttccacttctcagctaagtagggatggcctgaaggaccaggctggcaatagtggctcacgcctgtaatcccagcactttgggaggcctaggcaagtggatcacctgaggttggaagttcaagaccagcctgaccaacgaggagaaactccgtctctactaataatacaaaaattagctgggtgtggtggggcatacctgtaatcccagctactcaggaggctgaggcacaagaatcgcttgaacctgggaggcagaggttgcagtgagccaagattgcaccattgcactccggcctacacaacaagagcaaaactccatctcaaaaaaaaaaacaaaaaacaaacaaaaaaaggactgatggacactggctcacgggttggccagttgatcagggactaagaaagaacaagattaaagattaggtacaggaggtctgctggggatgtggatggacctttttgaatgggcactgaatgtgaagacttcttgtcctctgcaaacatctatcagaaggcatttggtatggaggaggtctctgtcatctctggatgttggacttttcctcccaaaacatctcagttcttgctcaaagagcccatatgtgaagtggctatagtaacaggatagaggctatgcatgtgttcaacctcataaactgcccttcatcctggctgatcttgctggccactgtcactgttaagtacccaacctgccaacagcagaagccaactttgagaaactgacaggacacgattcttttttttccttttttctctattcttctcttttttttttttttttttttttgagacggagtcttgctctgttgcccagggtggagtgcagtggcgtgatcttggctcactgcaacctctgcctcctgtgttcaagcaattctcctgcctcagcctcctgagtagctgggactataggcgcccaccaccacacccagctaatatttgtacttttagtagagacaggatttcaccatattggccaggctggtctctaattcctgaccttgtgatccccccacctcggcctcccaaagtgctgggattatagacgtgagccaccgcacctggccaggacacgattctttagggagaccagctggccacttgacggcaagtaaattagatcagactcctggaggaggcagtaatatgcctcccaggtatagactcagtccacacagggatgcgccttctctgcctgcagcacccacatctatggacttacagaacgctgcatgtgtctttatggtattcagcatctctcaccccaggacacattttcagtaaaggaagtgtgacagtgagctcatacctatggaattcagtggtctaaccatgttctttgtgttagattattatttaaaataatcagacatgcttctgtgaacccagaaaatcagagacaggtctcagttaatttagaaagtttattttgccaagattgaggatgcatccatgacaccgcctcaggaagtcctgacgacatgtgcccaaggtagtcgggcacagcttgcttgtatacattttagggagacacgagacatcaatcagtagaagaattacattggttaggtctgggaaggcaggacaatttgaagcaaaggcaggaagacttgaagcagggagggggtttccaggtcacagataagtgagacacaaatggttgcattcttttgagtttctgattaggctttccaaaggaggcaaataagatgtgcatctctctcagtgagcagagggataactttgaatagaatgagaggcaggtttgtcttaagcagtttccagcttgagttttccttcgtaaaaaggaaaatattttgggggtccaagatattttcctttcacactcccttctcccatacagaaggaatatacttccctgcttcatttctgctgggcttagccatgtgcatttactttggccataggatattggcaggtgtgatgcaagcaaaggtttacaatgtgtttgtgcagttggacttgtgttcttgcttctgccattgttagagaagccgaggcctaggagggccagagtgacaccattttaagttgagctccatcttgagactccttgccagtcacaacccatggtcataagatgtttacagttgagaaaacagcctaaagatacctgcaaggacacaatcctgtaacaacagaaagaccagatgtcccaatacccgtaatatatgctttcaagataattatagttatgctttaatgtacttatacactaaaatgtcaaggagagttttctttaaatcaataaaataataaattttgtcatgctgtcagaccacatgcacaaagacacagcttagtttagcctttacatagacaaaacccctatatatcaaatttttttttttttcagacagagtctcgctctgtctcccaggctggagtgcagtggcgcaatctcggctcactgcaagctccacctcccgggttcacccattctcctgcctcagcctcccaagtagctgggactacaggcgcccaccaccacagccggctaattttttgtatttttagtaaagatgggggtttcaccgtgttagctaggatggtctcgatctcctgaccttgtgatctgcccacctcggcttcccaaagtgctgggattaggcgtgagccaccgcgcccggcctatatatgaaaaatttaaaatggccaggcgcagtggcccagcactttgggaggcgaggcgggtggatcatcctgaggtcaggagtttgagaccagcctggccaacatgcgaagccctgtctctactaaaactacaaaaattcaccaggcgtggtggcgggcgcctgtaatcccagctactcaggaggctgaggcaggagaattgcttgaacccaggaggcagaggttgcagtgaaccgagattgtgccattgcactccagcctgggcaatagagcaagagtccatctcaaaaaaaaaaaaaaaagaaaaagctaaaacaaagacggggcattcctttgcttgcttcctaaggacgccctactctgtaatggaggcgctttcaataaactctcaccgtaccctgcaacttgtcttgaattctccttcctgcgtgtaattcaggaggcctctcttggggtctggatcaagaccgctttttctgtgaacaaccaccatgagaagaacacgccctgactgacccactggtccagggaagctgagacatggagaagacagggacccaatcttcagcttggagacacgtccagctgaactcagcccacatcagtgacctgcagatgcataagtgagaataaacgattgttgggttacgcctctgagtttgggaggcattttgttacacctctttagtgtggcaatagtagactaataatacatgctctattatgcagaagtgtgtggcttaaaataatagttgaatgaccaggtgcggtggctcaggcctgtaatctcaacattttgggaggccatggtgggaggatcacatgaggccaggagttcaagaccagcccgggcaacatagtgggacccccgtctccataaaatttttaaaaaattagcctggcgtggtgggcgcacgcctgtagtcccagctactcgggacggccagaatgaacggcattatcgtctgtctcttcattctgattctggccagcaaggggtggcctccccctgcggtccttgctgttaggtccctgcgccccctcagctttgcgctgaaggtcgctttaccggaccccacttcgccctaccaggcgcaggatgagcgtctctgttcttttaatgtggcgtcccccacaggccaccgtaccaggccgccggtccggggttagggcacttgacgccggcgccgccatgttgtctccgggccacttccgcgtttctggcgcgtggtcttgcatttcctacttggtcctgttcgtggcgccgcgcctccgggtgttggggagtccgggatgatggggaatccggggctcgccctagtcgcggggacaccgccttccaggagctgtccccaggcaaactcacagacatcttcaaagagccttcttggacattctgctttttgctcctcataacaggcttcggtaagagaacaggcaaacatcactgcgggcgcctctagggctcgtttccctgtcccagtaccgggaatcggggaggggtccaagcagagttcacttagttaacaaatcagtgaagcagttggaaaatctcagttatattttaaatgagatcgagggcggtgactcacgcctgtaatctcagcactttgggaggccgaagcggaggtggagggtcgcttgaggccaggagttcgagaccagcctgggcaacgtggtgagccacccccgcccccgcccctctataaaaaatacaagaattagccgggcttattggcatgggattgtggtcccagctacttaggaggctgaggtgggaggtcgcttgagccatggaggtcgaggctgcactgagctgtgatcacgccactgcactccagcctgaggctacggagagagaccctgtctctaattaataaataaattatagatagatgatagatagatgcaataaaaaataaaattggcttgtaaacggcaaactaaaagtggaaattatcattacaatgaaaatattaatttgaggaaccgaaaacttaactttccttttcctgtagttaagtttaagcacttagatttgcttcagtgattcccaggcttcatgattgcaagctgcttgcttgtaagcaccttgtctctcactaaaaaaaattacagttattttaaagtcccgctggatgctcattctttaaggagggtgaacaatggtaactcctgtaccgttagagctctgaatgaagccagatacgttccatagatcacagaactcattttctggcttggtgagcctggtcaagtttcttaacctttctgagccacagatgtttcaattataaagtgataataacccttcactgggaaggttattgtgaggataatatgagatcagctataccaaaatatgcctaacatgtacttgacatccagtaagctttctgaattaggatataaatggcattaatggttaatcattgttattcttttgttccatgatatgcatgaataacaacttgaagccttcaaactgctgagagctgcttggtggacctcgtctctcaatttgcccttcccactaaacctgtcttcccccaacagtgggctttctggtcagcatttcagaatgtctcaaaccgtaggtccttcccacagccccaaatctcagcaaatgaccagtctcttgcttcaagctattaaatggatgctgtctgacagccctcccttgaaacctgcaaactctcgtgctttggcatccatcctttccctctagtgcaatgcaagtcacatcctccctctggctaacctctccacccatcttctggattccccacacctctccaatctaatcttcacactccagccagggcgaacacttacaaatataaacacagtcatttcattctctatctagcaactttccatggacttccttttgctctcagggttcacctcaacatccttacaggctttccaggctgtgtatgctctggcttaccactgcttcttatttttttttttattatttatttatttatttatttattgattgatcattcttgggtgtttctcgcagagggggatttggcagggtcacaggacaatagtggagggaaggtcagcagataaacaagtgaacaaaggtctctggttttcctaggcagaggaccctgcggccttccgcagtgtttgtgtccctgggtacttgagattagggagtggtgatgactcttaacgagcatgctgccttcaagcgtctgtttaacaaagcacatcttgcaccgcccttaatccatttaaccctgagtggacacagcacatgtttcaggagagcacagggttgggggtaaggtcacagatcaacaggatcccaaggcagaagaatttttcttagtacagaacaaaatgaaaagtctcccatgtctacctctttctacacagacacggcaaccatccgatttctcaatcttttccccacctttcccccctttctattccacaaaaccgccattgtcatcatggcccgttctcaatgagctgttgggtacacctcccagacggggtggtggccgggcagaggggctcctcacttcccataggggcggccgggcagaggcgcccctcacctcccagacagggcggctggccgggcggagggctgacccccccacctccctcccggacggggcggctggccgggcagaggggctcctcacttcccagtaggggcggctgggcagaggcgcccctcacctcccggacggggtggctggccgggcagggggctgacccccccacctctctcccggacggggcggctggccgggcggggggctgacccccccacctccctcccggacggggcggctggccgggcagaggagctcctcactttccagtaggggcggccgggcagaggcgcccctcacctcccggatggggtggctggccgggcagggggctgacccccccacctccctcctggacggggtggctgccgggcggagacgctcctcacttcccagacggggtggctgccgggcggaggggctcctcacttcccagacggggtggctgcccggcggaggggctcctcacttctcagacggggcagctgctgggcagaggggctcctcacttctcagacagggcggttgccaggcagagggtctcctcacttctcagacggggcggccgggcagagatgctcctcacatcccggacggggcgacagggcagaggcgctccccacatctcagacgatgggcggccgggcagagacgctcctcacttcctagatgggatggcagccgggcagagacgctcctcactttccagactgggcagccaggcagaggggctcctcacatcccagacgatgggcggccaggcagagacgctcctcgcttcccagacggggtggcggccgggcagaggctgcaatctcggcactttgggaggccaaggcaggctgctgggaggtggaggttgtagcgagccgagatcacgccactgcactccagcctgggcaccattgagcactgagtgaaggagactccgtctgcaatcccggcacctcgggaggccgaggctggcggatcactcgcggtcaggagctggagaccagcccggccaacacagcgaaaccccgtctccacccaaaaaatacgaaaaccagtcaggcgtggcggcgcgcgcctgcaattgcaggcactcggcaggctgaggcaggagaatcaggcagggaggttgcagtgagccgagatagcagcagtacagtccagcttcggctcggcatcagagggagaccgtggaaagaggggagagggagagagagggagagggagagggagagctgcttcttatttttatttattttatttatttattattattatttttttgagacggagttttgctcttgttgcccaggctggagtgcaatggagcgatctcagctcaccgcaacctccgcctcctagcttcaagtgattctcctgcctcagtctcccaagtagctgggactacaggcatgcgccaccgtgcccagcttattttgtatttttagtagagacggggcttctccatgttggtcaggctggtcttgaactctcgacctcaggtgatctgcctgcctcggcttcccaaagtgctgggattacaggcgtgaaccaccacgcccgactattttttatttgttcttttgagacaggggtgatcctcccacctcagcctcaaaagtagctgggacttcaggcacacaccatcacacctggctaatttttttttttttttttttttgtagagacggggtttgggggttttgccttgttgcccaggttggtctcgaactcctgggctcaagggatatgcccaccttaacctctcaaagtgttaggattacaggtgtgagccactgcgcccagccctattgctttttaaaggtacaattaactttagcccaggctagctttttcactgaattgatctgggtacgatgtggggtttgggatagctgttcagaaaggtgaagacagagtcaaagagagaaaaacattttctctatagaggtggggaaactttcagagagaattaattgtgtcctctaaaagcaatgaagtccgcttggttagtttgaagaacgatcatgtatcagtttataggaattgagacttttttttttttttttgagatgaagtctttctctgtcccccaggctggggtgcaatggcatgatctcagctcactgcaccctccacctcccaggttcaagcaattctcctgtctcagcctcccaagtacctgggattacaggcgcctgccaccacgtctggctaatttttgtatttttagtagagatggggtttcaccatgttggacaggctggtcttgaactcctgacctcaagtgatccgcctgcattggtcccacaaagtgctggggttacaggcgtgagccaccatgcccggccggagttgaggctccaaggggtctcggggggtctcagaagctcagctgatgatatcttaatcaggtttgggtttttttttttttctgttagaacaggtcataaaaatactttcaccccaagccacaaaatcctataaaatagctcagtctttgacaaatacagtgaatataaaagagctcttttgagtttctatttactcaagatgtttgcagtgataaaatcttgatataagttttctagaatcttgaactttcaaagctcctttagaaacagtcctttgtgttgtttttattaaactcttcaatgaacacaaagtttttatgttgttcacacaaaatttaaataaggaagctgaaggtaggtgggaacccccaaatggatggtaatagaaaacctcctatagcatttccatagactggtttattcattatgcagcttggctcagcagaaccattttataatgaaactgcaagatgactcccagtgggcaaatcaacctctattctaaaggttgattcttgtcaactgggagaattgattcctgatgagaaatgctagactaaaaaaccctcccacattcacttcacaagccagatccaatatctttaatcctcttatggaaaagaaacaaggagacatttcagggcttacaacagccttccagaataattgcaacagtctcacagcatcaggggccaaaggaatattgacatctttccaactggaaatcctaaaccggttatctggagtgagacaatctatgtcttaaacttggccagagcaccttggattttttttttttttttttttttttttttttttttgacggagtcttgctctgtcccccaggctggagggcagtgatgtgattttggctcactgcaacctccgcctcctgggttcaagcgattctcctgcctcagcctccccgtagctgggactacaggcatgcgccaccatgcctgggtaatatttttgtacttttagtagagacagggtttcaccatgttgatcaggctggtctccaactcctgacctcaaatgatccacccacctcagcctctcagcgtgctgggattacaggcgtgagccaccgcgccaggccagcaccttggattttaaccaccatcctagatcaggaagtttaaatttctctccatgttaaaattttcctttctcatattgttaatacattactatttgattaatacaaattactatttgttaatacaaatacatgctatttgattcaggttttgaagcaaaattcctgataattttaaaactatgagagttatttctttctatgcatcttattgctgaggtcatcttagctgatcattaattggacaatatagtggtaaatccatactggtctttgactctgaaaacattctttcaaattccattggtgctttccactgttttgacacgactttaagatgttatccagactcttctgagcgcaaagaatatgtgtctgcatataaatggcctaacaaaacacaccactctgtctatagccatgaacaggaagtccccatctctgggcactgccagtcacccaagaggacaatgtgaagagctggggttgctgctctagggagaagcttgtgggcttgggcgagtttcagtttgggagtctttgtgacttaagcaggaaaaatattaactcagattactccctttggcctaaaaatcatttctattttttattgtttaatttttgaaatagaaaatgtattcatatggttcaatatttttaaagtatgaaaagataattcaatatttaaaagtctcactcctcataacaactgtagtctctttttttttttttttgagacggagcctcactgtgtcacccaggctggagtgcagtggcgtgatctcggctcactgcaacctctgcctcccgggttcaagtgattctctgcctcagcctcccgagtagctgggattgcaggcatctgccaccacgtccggctaatttttatatttttagtagagacggggtttcaccatgttggccaggctggtctcgaactcctgacctcgtgatccacccgcctcagcctcccaaagtactgggattacaggcgtgagccaccgcgcctgccctactagtctcttttatatctagagattcttgttgaaaatatgactatattcctctaaatctacctcctttattccttcccttaaaacggcctttttttttttttttaggcataaataatatacaacagcctgggcactgtggctcatgcctgtaatcccagcactttggaaggctgaggtgggcagatcgcctaaggtcaggagttcaagaccagcctggccaacacggtaaaaccccatctctactgaaaatacgaaaattagctgggcatggtggcgcatgcctgtaatcctagctactcaggaggctgaggcaggagaatctcttgaacctgggaggcagaggttgcagtgagccaagattgtgcccctgcactccagcctgggcaacagagaccgcatctcaaaaggaaaaaaatatatatgacaaagtgtacacatttaaaatgtgcaatttgatatgttttaacatatgtgtatacctgtgaaaccatcaccacaattggggttagggaaaaaatccatcaccccaaaaagttttcttttttttttttgagacagagtcttgctctgttgcccaggctggagtgcagtggcctgatcttggctcactgcaagctccgcttcccaggttcatgccattctcctgcctcagcctcccgattagctaggactacaggcacccaccaccatgctcggctaattttttgtatttttagtagagacggggtttcatcgtgttagccagatggtctcgatctcctgacctcgtgatccaccggcctcagcctcccaaagtgctaggattacaggcgtgagccaccgcgcctggcctaccaaaaagttttctcatgtatttccctagtgactaatgatgttgagcatcttctcatgtgcatttttgctttacctgtatcttctctgttgaagtatctgttcagatcttttgtgaggacaaggtacggggttccaggtagggatccaagttcattttttcgcatgtggatatcaaatgtcccggcaccatttattgagatggccatcctttctctacctcatcgcttttgtaaccttgttcaatatcagttgtccattgatgtatggatttatttatggactctattaggttccattgatctatctgccctctttaagccaatactatgctgttttgattgctatagctttataacaattttctcttttttggccctaatttcacatttattttatttttaaaattttgacttttattatagactaaagggtatatgtgcagctttgttgcatgggtaaatcgcatgactctgaggcttgaggtcccagcgatcctgtcccccaggcagtcagcatagtacttaactagtcgttcttcagcccatgctggtaacaactttcaaaatcaagtagtgttcttcctccaactttgtttttcttctgcagagttattttggctattttaggtcctttgcatttccagatgaattttagaatcagcttatcaatttttaccaaaaaaagaatctcatgggatttcaattggaattgcattgactctacacatcaatttaattgcctcctcttgtttcttttttatatgaaaggttgtccccatacacacagttctgcacctggctcttcacactccacaatgaatggagatctttcattcttctcccttagctcccattatagtttcattgtatccttttgttgggatggaacttatttcatttaactgtagtgaaactgatggattgctagcttactgctgatattttgctattacaaacagtgctgcagtataatcactgtacgtgtcatttcccttgtgggcaaatatatctgcaggatgaatttgagaagtgtgattgccaggtcaaagggaatatacatttaacattttactggcaagggccaggtgcggtggctcacgcctgtaatcccagcattttgggaggctgaggcgagcggatcacaaggtcaggagattgagaccatcctggctaacacggtgaaaccccatctctactaaaaaaatatacaaaaaattagccgagtgtggtggcacccgcctgtagtcccagctactcgggaggctgaggcaggagaatagcttgaacctggggggcagaggttgcagtgagctgagactgcgccactgcactccagcctaggtgacagagctaaactccatctcaaaaaaaaaaaattaatggttatggctaaatcctttcctagagtttcataatttatatacttttcattaatacattagaaggcttgttttgccatagccttaacagtgcattaccaaactttcttgtttttgccaaattaataggtgaagatggcctatcaaaatcattttgattttcacttctttatttcaggtaagtttaaacattgtttcatgtgttgaagagccatttgtatttctttcttttttttttttttttttttgagatggagtctcgctctgttgcctgggctggagtgtagtggcgcaatctcagctcactgcaagctccgccttccgggttcacgcgattctcctgcctcagcctcccgagtagctgggactacaggcacccgccaccacaccttgacagggtttcaccgtgttagccaggatggtctcgatttcctgacctcgtgatccgcctgcctcagcctcccaaagtgctgggattacaggcgtgagccaccgcgcccagctgtatttctttttttgagacagagtctggctctgtttcccaggctggagtgcagtggtgcaatctcaaatcactgcaacctccgcctcctaggttcaagtgattctcctgcctcagcctccctcgtagctggcactatagttatacacccagctaatttttgtatttttaatggagacagggtttcaccatgttggcctggctggtctcaaactcctggcctcaagtgatacgcccaccctggccttccaaagtgctgggattacagggatgagccaccgcaccccgccccattgtatttccttttttctgactttttgttttcacaaccttggctgctatggtctgaaggtttgtgcccccttaaaattcatatgctgaaatcctaacctccaaggtgatactaggaggtggagacattcagaggtgattaaatcaggagggattatgtctttataaaatagtcctgaaggagcttgttggccccttccaccacgtaaagacacagtcagaaggcaccatttgtgaaccagaaagcatttcctcagtaggcaccaaatctgtcagccccttgacctaagagttcctagcttctgccagaactgtgagaaaaaatttctgttgcttatataaaccacgcagtttgtggtattttgtcatagcagcctgaactaagactcgcacactttttctccattttgccatctttgcttataccttttttctttttcttttttttttttttgccataatggaggttttaaaaatatttatgcatttgaaattactagcctttcctttgaggctttagatttttagtcttaattagaaagtctttccccactccagtatttgaatttcctcgtgattttcttcaaatactttgatgagtttttttttcttttacattgaaatctcttcattatttggagcctattctactacagtgcatgatatctaatttgtttccctgttgtctcaacaccagtccatctttccccccacccacctttgatgccactttatatagtaaatgttcacgtgtttgaggctatttctggatttttctgttctgttccatggaatgtctgtgtaatcatgcatcagaaccacactactgaaactgtttttcaaattataatatggcgtaatatctggtaggagtggtctcacctcattgcttagttttctgacattaatttttccatatgaactttagaatcagcccattacaggaaactgtttgcatttttatgaggattatatgccatttttaagttattgtaggaagaatcaaccctttctagtgtgatttttttttctttttttctttgagacagagtctcactttgtcacccaggctggagtgcagtgatgcaatctcagtttaccacaacctctgcctcctggattcaaatgattctcctgcctcagcctcccgagtagctgggatgacaggtgcatgccaccacgcatggctaatttttgtatttttagtagagatggggtttcaccatgttggccagtctagtctccaactcctgacctccggtgatccgcctgcctcagcctcccatagtgctgggattacaggattacacggtggtgcccggcctcagttttgacgactttccctgatgactaatgatgttgagcatctgttcatatgcttattgaccatttatatcttttttttttttttagatggagtttctctcttattttccaggctgcagtacagtggcgtgatctcggctcactgcaacctccacctcccaggttcaagcgattctcctgtcttagcctcacgagtagccgggattacaggcacatgcccccattcccagctaatttttgtatttttagtagtgacggggtttcatcatattggtcaggctggtctcaaactcctgacctcaggtgatccgcctcggcctcccaaagtgttgggattacaggcgtgagccacccactgtatctcttgttcggaggaatatctaatcaagaaaatcatttttactgtttttattttttggtttgttcgtttttttcctgtgagatggagtttcactcttgttgcccatcctggtgtacaatggcgcgatctcggctcacttcaacctccgcctcccagtgcgtccggaattggtgggttcttggtctcactgacttcaagaatgaagctgcgcaccctcacggtgagtgttacagttcttaaaggcggcgtgtccggagtttgttccttctgatgttcagatgcgttcggagtttcttccttctggtgggttcatggtctcgctggcttcaggagtgaagctgcagaccttcgtggtgagtgttacagctgttaaggtggcgcgtctggagttgttcgttccttccggtgggttcgtggtctcgctagcttcaggagtgaagcttcagaccttcacggtgagtgttacagccgttaaggtggcgcgtgtggagttgttcgttccttccggtgggttcgtggtctcgctagcttcaggagtgaagcttcagaccttcacggtgagtgttacagccgttaaggtggcgcgtgtggagttgttcgttccttccggtgggttcgtggtctcgctagcttcaggagtgaagcttcagaccttcacggtgagtgttacagccgttaaggtggcgcgtgtggagttgttcgttccttccggtgggttcgtggtctcgctagcttcaggagtgaagcttcagaccttcacggtgagtgttacagccgttaaggtggcgcgtctgcagttgttcgttccttccggtgggttcgtggtctcgctagcttcaggagtgaagcttcagaccttcacggtgagtgttacagccgtgaaggtggcgcgtgtggagttgttcgttccttctggtgggttcgtggtctcgctagcttcaggagtgaagcttcagaccttcacggtgagtgttacagccgttaacgtggcgcgtctggagttgttcgttccttctggtgggtttgtggtctcgctagcttcaggagtgaagcttcagaccttcacggtgagtgttacagctcatagaggcagtgtggacccaaagagtgagcagtgacaagatttattgcaaagatgaaagaacaaagctcccacagtgtggaaggggaccccagtggattgcctccgctggctcgggcagcctgcttttattctcttatctggccccacccacatcctgctgattggtccattttacagagagctgattggtccattttacagagagctgattggtctgttttgacagggtgctgattggtgcgtttacaatccctgagctagacacaaaagttctccacatccccactagattagctagatacagagcgtctacacaaaggttctccaagtccccaccagagtagctagatatagagtgtcgattggtgcattcacaaaccctgagctagacacagggtgctgattggtgtgtttacaaaccttaagctagatacagggtgccgattggtgtatttacaatccgttagctagacataaaggttctccaagtccccaccagagtagccagatagagtgtggattggtgcattcacaaaccctgagctagacacagggtgctgattggtgtgtttacaaaccttgagctagatacagagcgctgattggtgtatttacaatcccttagctagacataaaggttctccaagtccccactagactcaggagcccagctggcttcacccagtggatcctgcaccagggccgcaggtggagctgcctgccagtcccgcaccctgcacctgcactcctcagcccttgggtggtcgatgggactgggcgctgtggagcagggggtggtgctggtcagggaggcttgggcctcgcaggagcccaccgtgtgggggaggctcaggcatggcaggctgcaggtcccgagccctgccccgcggggaggcagctaaggcccagggagaagtcaagcatagcagctgctggcccaggtgctaagcccctcactgcccgggctggcggggcccactggctgctggagcgtggggcccgcggacacccacgcctacccagaactcacgctggcccgcaagcaccgcgtgcagcccgggttcccgaccacgcctctccctccacaccttcccgcaagctgagggagccggctccggccttggccagcccagaaaggggctcccacagtgcagcggtgggctgaagggctcctcaagcaccgccagagtaggcgccaaggccgaggaggcgccgagagcgatcgagggctgtgagggctgccagcacgctgtcacctctcaccgggttcaagcgattctcctgcctcagcctccccagtagctggaattacagacgtgcgccaccacactccgctaatttttatttttagtagagacggatttctccatgttggtcaggctggtcttgaactcccggcctcaggtgatctgcccgcctgggcctcccaaagtgctgggattacaggtatgagccactgcacccagcctttactgtattttttagcagaaagaaaatgattgcattacagtggttatttttaagggccccaacctccactttgtcctgagatctacgttgtgttgttttcagtgttttaacaggcctttttatttttataaatgccccagaagttgtagcgcagccctaactttctagcaggacttttagaagctgacaattttcctaagtttcattcacatcacatgaaggcagcaattgttaaaatatatttagattccattagggtacattttgctatcacattgaagtctctcaagaatcattttattcccatcagatgttgttactgagcagtttctagtgctgaacatgactaagaacctttaggtggtgctctttgattaaaaacatttatccctcaaacaacttaaatacagtagtatattgcaggaaaaagtgacctttatttttttagggatgatctcccaggtctgctcaatttttctgccatttctattgcagaggctaataatttgcccatctcctcccagcccaagcaccccaagactgatacttttctatcacctgctgctaattttgcctcccaaagagtctcccatctcgacgcagagagaaccttcttagtggggtcacagcttcccttgcgtccaagagctgtctgtcccacagcctggtcagactcccacagcctcgtcagactcccacagcctcaaaccccaggtttgccactcacttcctcactcactcctctttgctcatttttctgccaacgattcgtcatgtatttctaggactatctgctcacttctcaccccttactttttttgttttgttttttgagacggagtctcgctgtcacccaggctggagtgcagtgtcacaatctcagcccgctgcaacctccacctcccaggttcaagtgattctcctgcctcagcttcccaagtagctaggattacaggtgtgcaccaccatgcctggctgcttttttttattcttagtagagatggggtttcaccatgttggccatgctggtctcgaactcctaacctcaggtgacccaccaccttggcctcccaaagtgctgggattacaggtacaagccaccgtgcccagccccagtccttacttttggttgagggttacctttcctttcattctggctaaagagttgaggtcagttggaaaaacccagactcaatcttccttttttttttttttttttttggagagagtctcactccattgcccaggctggagaacagtagcacaatcatggctcactgcaacctctgcttcctgggttccagcaattctcctgcctcagctgccagagtagctgggattacaggtgtgcaccacctcacccggctaatttttgtatttttagtagagacggggtttcgccatgttggccagactggtctcaaactcctggcctcaagtgacccgcccacctcagcctcctaaagtgctgggattataggcatgagccaccatgcctggctgatctccctaactctaaatctttacccctctgtctctaaagtctggccacctttttaattcttttagagacagagtcttgctctcacccaggcttcagtacagtggcataatcgtagctcactgcagcctcaaactcctgggctcaagtgatcctcccacctaagcctcccaagcagcagggactacaggcacatgccactacactgagatgtttttttttgaaaagacagagtcttgctatgttgcccaggctggtctcaaactcctggcctcaagtgattctcctgcctcagccttccaaagtactgggattacaggcgtgagccacagtgcccggtcctgatcaccttttctccatcaccttttccctaacacttagtttccctttctccatcacttcttccctaacacttagtttccctgtccccgactttctcactactaaaggacccctacattcctctagaaaccttgtgggactagattcttctgtcacataccctattcttaaaaataacaacaacaacaaaagccaatttaaatactttagaagatcatacttttcaaagattttactaaatcatttttttaaacaaaatatacattaaatctcagatttacagaatatagaaataatttatccaaagaaatttgcatttaaaattgttaatattgcacccaacagtatgtctttgacacatttgcattgtcaatctttcccacaatttgcaaaaacaggagagaaatctgaaactaacagaattacacaagctaagttttctgtaaaaaaagaaaaaacttacaattttttatttacaagttaaggaaaagttgtaaacgttcaggattttacttccacagaataaaaagccatacattcttttatcatacctagaaaatgaacatatacacattgtgattacctcataggaattcaacaggactgatattgtgaacattcacagcccaatggtaaaaaacagaattctcgaactatggaaactagtgtgtgaaagacacagaatgagaaaaatgtctggaaaaaaattactttctcctctttgaggagtttccataattacctaaagttatcttcaaatttaaaaggacacaccattccccagtcttaggaatgtggctgccaataaccttttctctcgacataagacaagtgaaaaagagtgaggtctttgttcaagtccctgataaaatactttgcatataggcaggcacaaaagtttgctttccaaaagaaagctttgcaaaatattctgcaatttattactgatatcctcagtttttaaaaaccccctttttaagcccataaatatttatatgctttaaaaaatgagagtagggaatcaaatcatttggtactatgggaagctgctaaaataatatttgatagtaaaagtatgtaatgtgctatctcacctagtagtaaactaaaaataaactgaaactttatggaatctgaagttattttccttgattaaatagaattaataaaccaatatgaggaaacatgaaaccatgcaatctactatcaactttgaaaaagtgattgaacgaaccacttagctttcagatgatgaacactgataagtcatttgtcattactataaattttaaaatctgttaataagatggcctatagggaggaaaaaggggcctctgggaaattatgctgaagatcaccgaaaggaaaatgtaactgtaattttataatacaataccatttgaactgaaatacaacatgctttgtaattctattgccctggattgagactggattaaaacgttccctttcaaccataatgtacataaccagttgaataataggacttttattattattaaaaaattttttttgagctggtgtctcactctgttgctcaggttggagtgcagtgccacgatctcggctcactggaacctccacctcccaggttcaagcgatttccagctaatttttgtatttttagtagagatggggtttcaccatgttggccgggctggtctcctgacctcaagtgatccacctgccttggcctcccaaagtgctaggatgacaggcatgagccaccatgcccggcctatttttaaatttttcttaagacagagtcttgctctgtcacccaggctggagtgcagtggcgcaatctcggctcactgtaacctccatctcccaggttcaagcgattcttctgcttcagcttctcaaataggtgggattacgggtgcccaccaccaagcccggctaatttttaatttatggtagagacagggtttcaccatgttggctgggctggtctcgaactcctggcctcaggtgatctcccctcctcagcctcctaaagtgctgggattacagacctgagccaccacgcccggccgaataataggacttttaaaagtcctatttcttggctctgctattgtttaatagtccaacccaaggagtttgttataaagattatttattgtcttcaatatctttgtgatgaatgcaattcacacacacacacaaagtcctgagagtctttcataaaaaaatagacgtgctttgtggccgcatcccagcctgggggtaagggatcagctgtccccggtgcgcctgtactccgcggtgccatccgccacgatggcatcaagcggcgagcgcttcttgcggatgctgcgcccggaggagatgaggtccgcgtagccccgctggtgcgagaaggcgtaggccgagcgccgcgttgacacgccccggcggaacacctgctgccgtcgctgccactgctcctccgccttcaaccgcttgcgatgcttctggatctgcaagggggagagatggggagggatgaaaataagatccacaccagggaggaggcctggccagacggttgacagaaatgaacactgatgaactcccctgacacctgccccattttgatgcaggcagttctgtccccacttgtgtgtgtgtgtgtgtgtgtgtgtgtgtgtgtgtatgtgtgtctatatctttttttttgtttttgagacagtctcgctctgtcacccagacttgagtgcaatggcacgatcttggctcactgcaacctctgcctcccaggttcaagcgatcctcctgcctcagcctcctgagtaactggggttacaggcacgcactgccacacccgtctaatttttgtatttttagtggagacagaatttcaccatgttggccaggctggtcctgacctcaagtgatctgcctgcctcggcctccaaaagttctgggattacaggcatgaaccacagtgcttggctatatctatctatctatctatctatctatctatatcgacatatatatatgatgatataaatctatatccatctctctatatctatacatagattgattgatcaatcgatctacctacctacctacctggagatatatattgaagccaagggaaggttatttaacttttccaaggtcacacagctagaaaatgcaaagccaagattcccactcctctgaagctagtgcccttttctagttcagaccagatgggtacagtcaaagagaaaattcagtagggcctctttcctgggttgttactgcatactgttggcactgcaaaagggagacccgagggatactgaaggttgcctcagtagcctctactctctccttctttctaatggaaattgattgtattcagattgccccccccaacccctcacagccacatttctcatgggcggtgggcaggttgatttcccttgctaaactagtccagaatgggcaagtgacctaattttggcacgtgagacctgagggcactgtactggggcccttgggtgagaagttccacggcccctaaggagctacagaataggctcttatctccccccgacactgataggtcaggaagtgatacccagaactgctctggccatcttccagcatccatatgaagctaataatgaaggtttctgagagaagagatggcaagaaccagcccaatcctttcttgacaacattaaattgctcaatcaactgggcctgaagcctactaatgattaatgatgacgcactactgtagagatgttttgagtcacagctttctgttccttgtagctcaaaggatcctgctacagaaggtgacatttttcttaaataaagaaaaaaaacccaatctgatttgtatgacaaaatgttaatactgtaattgttaaactgaggagatagatatatggggctcattctgttctcccttttttgtttatgtttggtaatttttgtattaaaaagcaagcacactaaactcccaattccaaaagacttatttgtgagatagagttaaagagaagcaatcatgaaaaatcattcttaccaaacttcccatgagcttagaattttgcaggaaacgtgctgttgggaaacgctttggtttctgtgagggacagagttgggaaaggactatattctttataccttatcactttctgatggccagatggtcattgacaggaatcgaatggcaacgacgggtagtaagcacacagcaacagccaggatgatagttaaccaaatgtatggctgtctcagagcgtttgaagctgtgcctgtaaagaacatggcaaatgcatcactgtggttcttttttcctaagaacatagttaatatttcgccaggtgtggtggctcatgcctgtaatcctaacactttgagaggccaaggtgggtggattgccagagctcaggagttcgagaccagcctgggcaacatggtgaaaccccgtctctactaaaatacaaaaaatcagccgggcatggtggtgtgcacctgtagtcccagctactcaggagacagcagaattgcttgaacccggaaggcggaagttgcagtgagccgaaattgtgccaccgcactccagcctgggtgataaagcaaaactctgtctcaaaaataaaaaataaaataaaaaaaagaacatagttaatatttcataatctataaatagatcatttatggtaaagttttacaactggattggcctccccaaaatatccattatggctcaaagaacagacattttaaaatcagactaagcaaagcaaaattgggaaggtaaattatttgaaacaaggcaaatttacataagtgagcaaataaggaaaaaaagcacatttgttgacattgcattgattaaaaatgcaaagttaggtgatcaagacttctgacttttttttgagatagggtctcactctgttacccacgttggagtgcagtggcgtgatcatggctcactgcagcctcaacctcctgggctcaggtgtcctcctaccttagcctcctgaatagctgggactacaggtgtgcgccaccacgcttggctaatttttgtattttttgtagagatggggtttcaccatgttgcccaggctggtctcaaactcctgagctcaagtgatccacccatattggcctcccaaagtgctgggattacaggcgtgagctaccacatctagccccagtattaggttttatgggaaagaaagaataggcttttatccagccttttaagtcttaagttatctaattcaacacacgtacagcgctattgtaaagctattttaatttgtcttcctcccatcatgttatgccctttcaacccaccatcaccatttaatttccagacaagacattaattttcactagcaataataatttgtatatatttgttttgttgtgctttgttttttttgttttttttttgagacagggtcccgctctgtcacctgggctagagtacagcagtgccatcacgactcactgtagcctcaacgtcccaggtcaagcaatcctcccacttcagcctctccagtagctagaactacaggcatgtgccaccatgcctggctaatttttttgtattttttgtagagatggggtttagccatgttgtccaggctggtcttgaactgctgggctcaagcaatccacttgcctcggcctcccaaaatgctgggattacaggtgtgagccactgtgcccagccattccaccttgtatattttattacttaacagaagttatgtcaaaatctaaactaatgacatttgtctgtacatttatttttggaatttggaaataccaacctgtaaattgaaatgcagatggaaagagaacatgtattccagcactatgaaagtcaaacatgatgccaaaataaagtgcaatgcttccaaaaattgaaaaagcattcacaaaagtccaataagaagtatccaagccaatctgttgggaaaccagagaaaaacagagcactcattttggggagttagcaagaaataaaggatctaacaatcctgaaaacagaattcagcaagttaggcatgatgtggcttgaatactggaccagaaactaaaccatccttgactcaggcaagaaatagaaaatgtgcttggtataagagatgaaaatagcatttatattttgtaagtggcacaggtgcagtgggagtcaggtggatgtgcatgccaccctatatacagaaatataagtaggtaccaatagacactgaatacggccaatgaaagccacgtacctggaaattgactgttattacaagagcagaggcaatggtgacggcaaaagactggtagtcggaaggtgcctctccatcctgccctacggtttgcagataagctccaagaggtatgaagaagaggatcatcgatgttaggaccccatgcaacaagcttacaaagaatctcttatagttgaatagtaagtctctttgtcccactatgtataacccagggaatcggaggctcagtttgtcactcacatccttaaggagaaaacaaaatgatggtattttattcatcaggtcaaagcagtcagagatatgttataattaatatctcacaaaaagttgcagcctgctgttaaattttaggaaggcaaaaactgaacaagataatcgatcaatcctgcaatatttgtggtgtgcagagctcaacctcattgcttagaccaccattacttaatatttaattcagagaagggctaggtataagtttattactttgctacttatggaaagaaaacaaattagtaatgtccaaaaatatgtagggaggctactgtttttacctcctgagtgaatatatattgttgcaaatcctttgggaaaaaattttctcatacaagttgatgagttaattataaattattactttttagtctttatagtgcttctttctttttaagaattggtattagataaaaatatgcactagctacataaattttggaaaggatttaaactgactttaaaatgagtaaattattattgtggagacatattggactctcgggtgcctttttttccttttcttttctttttttttttttttttttggagacagggtctcactttgttgcccagcccggagtgcagtggcacaaacacaactcactgcagcttcaaccttccaggctcaagcgatcctcccacctcatcctgccaagtagctgggacttcacaggtgtgcactaccatgcccacaatttttaaatttttctgtagagatggggtctccctatgttgccagggctggtctcaaactcctgacctgaagcaatttgcctgcctcagcctcctaaagtgctgggattacaggcatgatccaccatgccctgccttcaggtatcttcatagtaagctcttactgtctaaaaggaacataacaaatatgtgtgccaatgaattcaacccagtcacagaaatcctcttttctctttttttttttttttttttttgtcttagagatggggtctcactttattgcccaggctagacttgaacacctgggctcaagtcatactcctgcatcagcctcccgagtagctgggactacagagaaatcctctttccttattacaaaacaagaagcacagccatgacccttgatgcctgacaacagaattataatagggtttgatcagaaagaagtaaacaccagaagaatgcattgaaacgtttgcttgggacttctctaacgcattctcatctgtccagaagtgtccctgcttgtgcgaggctcctacctggtcgagcagccccatgaggagcacgggcaggctggtgtacagcacgttgtagagggtgatgaaccaatcctcgtatgcagtctgtgaggggatgacagaggctccatgtcaccaacaaagacacatgccagcctagttagcacatactcatctgcttcctttatttaacattttgtttgtttgtttgttttaatagagatgggggtcttgctatgttgcctaggctggcctcgaactcctggccttaagcgatctccccatctcagcctcccaaagtgttgggattataggcaaaactctatgcacctggcctgttatcaatattctttttttttttcttctgagacagagtctcactctgtcgcccaggctggagtacagtggcgtgatcttggctcactgtaccttctgcctcccaggttcaagtgattcttctgcctcagcctcccaagtagctgggattacaggcacacgccaccatgtctggctaatttttgtgtattttgttgagacggggtttcaccatgttggccaggttggtctccaactcttgacctcaggtgacccgcccacctcggcctcccaaagtgctgggattataggcgtgagccactgcacccagccctgttatcgctactcttaatgtcaacatgaaaaaataaccaaagataaagataaaaacatacaagcaaatcccctcctttttttttttttttttgagacaaagtcttgcccaggttggagtgcaatagcgcagtctcggctcaccacaacctctgcctcccaggttcaagcgattctcctgcctcagcctcccgagtagctgggattacaggtgcctgccaccacacccggaaaatttttgtatttttagtagagaccaggtttcaccatgtcggccagactgatctcaaactcccgacttcaggcgatccacctgcctcagcctcccaaagtgctgggattacaggcgtgagccaccatgcctggccaaatcccctcctttctaaggtaaaatgtttttacagcaccagaaacatttagagaagtcatgatcattcttaattatgccccaactgtaaggagacacagccccaaaactacaaatatagaagaaataaattgtcttttcagaactagatttttattcatttaagagctctacttagtaaataacaataataacaacattacattacctgcgcagagtagccattgaagaaggagtaccagaaatgaaccaaagtaaaggcaaagtttttgtaaaagaagtatcgtaggaacttgcacatccttatgtaagaccatcggccatgcaccagcagtagcctctgcagatatcggaactgagcaaaggaatagtcactcgacatgacagcttgcattccttcttgtccacttattccaacgccaatgtgggcagctatggggcagagggagaaaacactgtggatcataaaccgattgtgaggcaaaacatcagttgataaaaatggttccatagcaaacaaaaaacaaagacagacattgatggaacaataatacagaagctcttgctcaccatccctcacccccagctcttgaactcaactcaaagtctgagttacaagttgctaaacagagcacacagtagggcctccataaatatctgggaaaggatctcatgtgggtgacgaattccatttggattatctgccaagatcacagccatcccttccatccacagggtgagccccaggcacccatgtgtacactgtgtccttgcctctttggcaacagctgtgtcagtcatgggcagatatgtaatttgtggtagatactacaaatcggctcccccaacttcattccatccttgttctaattagagaggtgggaaaggaaataaaaaccctacatttcccagactcccttgcagctaggctctttgtgaattaggttccactgtttagatccacttatgacttggaagcagaagtgaatcagagcccagcatcgcttcctcttttgggatttctgcagcagagctcatatctactttccagctacctggatgttgacaggcaactataaaggcttcttaatttggaagctctttagaggaacctcttatcacttaccagaagagtagaagctcttctggtaagtgacccagcctagaccctgcttctgtagaccatccagagcttttgaaagtacctagtcccctgtatgaatcttttcttgcttaaataccaactggggtctgtttcctgtgctaaaccctgactgacagaaaacccaagctgagccagtctctctcttgatattctggaattagaagtcagttattttgtgtctagaattttaaggtctaaattcttgaggtaagaaatagttatatttctttctctctcttttttttttttttttgagatgaagtctcactctgtcacccaggctgcagtgcaatggcgcagtcttggctcactgcaacctctgcctcctgggttcaagcgatactcttgcctcagcctctcgagtagctgggattacagatgtgcgccaccacacccagctaatttttgtagagacggggtttcaccatgttgtccaggcaggccttgaactcctgaactcaggtgatccacctgccttggcctcccaaagtgctaggattacacacatgaacaactgtgcctggccgaaatagatatatttcttcctgaagatttctaaggggcagagaaataaagtagtggggagagaggggtggggaggagggagagaatggagggagagaatggggggagagaagagtggggagagaagagtggggagagaagggagggaggggagagagagaaggaggggaagaaggaggaaagggagagagaaggggagagagacagacagacacggggttcctggtgcaaatctatgtccttgttccagtatcttcctgaggcctggcttcttcttggacaacaggaggtgtttaaataaatttacttttttcttttttttcttttaagttacaggatacctgtgcagaacgtgcaggtttgttacatgggtatacgtgtgccatggtggtttgctgcacctattgacccatcctctaggttccctcccctcgtctcccactcctcaaatttaattttttcttaagctagctttggttgttctccaatacttgtaatcaaaagagttttaaccaagaaactattaaactttcaaagtcttattcatggccctctgggaccttaagacattttttttttctttacgggggaaggtttccagaatatataaaattaaagtcacaattttatttatgcttccaatagtcataaataacactttcaaattagagaatgattagttttgtctgggtcttaaaagtaacgaatgtgaagatagacaagatcatttagaaaagatatgttggagaacacaacctatcattgctcagaccctgaaaagtggctgcaatgctgcggcgttccaactaaaaagaagcttcaaaaatcctgccctagttacagaacacaaggtctggcaaattcaaaacataactgtagtgatgtatccaaacctacgttttcagtaacacttctaaaaaaacagaacaaactgcatctcatataatatttatgttctctttgaaaacacacaaatatttcctatgaccagcatggttgccaaacttgctctttcctgccaaaccatggccttttctttcctgaacaagccactgaggaaaatgctgagattctcttggcttatgtggctgaggaagaggaagccctgccccaggccctggtatccagtcctcaaccttcccgctgagcagaccaaggacaaatgtgaaatgaacactgtcatagttcccagggcaaccaaaagcactgaacagatacactataaggtaacattggtcttttttgtaaaatttaagtacaggcatttagagtttcctgaaatctcaaatgcggtgttaggtgcctcactggtagacattcttttatcattccttaacaaaaagaatatttcctcgctacagcaataatccctcttgcctttttttttttgagatggagtctttttctgtcgcccaggctggagtgcagtggtgcgatcttggctcaatgcaacctctgcctcctgggttccagtgactctcctgcctcaggctcccgagtggctgggattacaggtgcccgccacccccatgcccggctaatttttgtacttttagtggagatggggtttcatcatgttggccaggctggtctcgaactcccaacctcaggtgatctgcctgccttggcctcccaaagtgctgggattacaggcatgagccaccatgccccaccttgcctttatctctctcctgcttcacgtacattctcagggtctaagaccaagaagagacaacatccacccagctggtatgagatatcttcaggtaggatagagggagaaggcagcctatgatagtccttggatccttgctaggggcagaaacatggtgggtcatgattccttcacttcttccagactacactgctaaacgtgaatgttagcaaatgctcagattattttttgacacttgaataatttcactcgactactttatgaccaacaatttctttgtgtgtgtgtgtgtgtgtgtgtgtgtgtgtgtgtgtgtgttcttttttgttgttggagaaagggtcttgctctgtcacccagggtggagtgcagtggcacaaacatggctcactgtagtctcaacttctcaggctcaagtaatccttccgtctcagcctcccacgtagctgggactaccggtgtgtgccccatacttggctaaactttctgtatattgttattgatgtggttggaagaaatgacagcttttacaaagtacataaaggcactaatactacttgtataacttctaaggagacccctaaagtttcctatatttttatcccaaagggatgctctataacttatatataaaagtacctggggccaggtgaggtggctcatgcctgtaatcctagcactttgggagactgaggcaggcagactgattgagcccaggagttcaagaccagcctgagcaacatggcaaattcccaactctacaaaaaatacaaaaattagctgggcatggtggctcatgcctgtagtcccagctacttgggaggctgaggtgggaggattgtttgaggccaggaggtggaggttgcagtaagccaaggtcatgccactgcaccccagcctgggccacagagggagaccttgttttttttttaaatgcacctggcatataacagtgcttaataaaaattttaagacaacttaagaaaaacaagcccctctaagattatctacattgactttgtgcaatccctctcattatgtattggtgaactcagaggaacaaaatgtttcaagtctaagtcacataatcagttgataaatctccaaagcaaacccgtcccctcccattatctagaaggctactttataactgaataaaaatcatgtttgacttgtccttttggcacggctagttacgttaaaggtacgtaatggaaaataaactagagctggctggctatggaggaaagagatagatctaactccgagcaagcaataccattcgcatggtagggcaagcacatgcaaaaaaaaaaaaaaaaacagtgtggatgaattaaactgctagtgaccacagacatacgcactgataaagaaggcaagatgacatacgtcatacagctgactcctgttgaggaagataaagttggaatattcttagtatacatcaaggaggaggaggagactaagaaaagaaagagacagactcatgagtcacaaaatagactgaaaagtctagttatatataatgcatttaagcaacccagcatcacaggaacatgcaattacctatgtacagtcaggtaatacttcagctcagtgataataatacgacagagctggaggtgacattagggattattttcttttccgatgagaaaactgaaacctgagcataagcccaaggtgacaccggattttggcaataggatgaggatgaatatccaggtcattagtttgagtatttttaatacaagatactcccttatagtgacagagggaggaaaaaggaacagaattcagacatagagatgagggctgtgggtgtgcttctgcaggctttaataccagcacaactgtatttctgcatggcaggactcaatattttaattgtgtggacttaaattctagcatccagaaaaaggcagccttctagggaggtgaggaggatgatgagagcacgtggaagcttttcttcagtgctaaacatgttactctaaactcacaccaggtgacccaatgatgaagttcccacagatttaccaaaggtaggaagaaagtcccagaaagaaatgcttagatgaaggagaatgatattgtcaaagcaagcaccagccagagttcaataatttatgtcttacaaaacttattaaatatcagggttttttgttttgttttgtttttttgagatggagtctcactctgtcgtccaggctggagtgcagtggcacgatctcagctcactgtaacctccgcctcctgggttcaagtgattttcctgcctcagcctcccgagtagctgggattacaggtgtgcaccaccacacctggctaatttttgtatttttaatagagacggggtttcagcatcttgatcaggctggtctcgaactcctgaccttgtgatccacctgcctcggcttcccaaaatgctgggattataggcgtgagccactgtgcccagccaatatcagggcttttaataaacccaaaatatgggaagagaaccagtaagagagaaaaaaatacacaacatctatataaaagaataaaaatataaggataaatttccccccatagaccttattttcctcttcgcatccttcagaagccctgtcagtgatactctttcctcctgatgggctgtgggctttctgggggtagggtcacaggcgttgtcatggttaagtgactttatgaaacatctgctctatgaaaacctaagctgtaaaatctaaaaaaagaaaatccaccccctacacattccagccatttctcctctctagcacgttgggcctcactggccgtgggtgcatgactcacttttgatcatgttcacgtcattggccccatctccgatggccagcgtgatggctttcttgtacctcttcaccaggtccaccaccatggccttctgcttgggggtgacgcggcagcagatgactgcgctgcactcgcaggccaggtccacaaagtttttctgccgctgctctttcttagcttctagcctccttttactttgggtccgcatccgtctttcttcttctgttcttgggaacttcagcttcagaatcttatttctcttggtctttttctcgagaagaatttcattctgtgaaatcagagagggaaaaggttacattcactttagttttaccccaggagtaccattcccaagatttaaattatgtgaaggataatttttggattatgtcactgattatatttgacaaataaatttgattttataaccaaaacatgtatatatatgtgtgcgtgtgtatgtatatacacacgcacacatatatgtatgtgtgtatgtatatacacacacacacacacacacatatatatatatatatattttttttttttttttttttgagatggagtctcactctgttgccaggctggaatgcagtggcacgatctcggctcactgtaacctctgccttccaggttcaagcaatttccctgcctcagcctcccgagtagccgggactacaggtgtgcaccaccacgcctggctaattattttttttgtattttagtagagacggggtttcaccatattggccaggatggtctccatctcctgaccttgtgatctgcccgccttggcctcccaaagtgctgggagcacaggcgtgagccactgtgctcagctatatatatatttttcaatggagatggggtcttgctgtatagcctgggttgaagtgcagtggctattcattcacaagtgtgatcattgcatgctgcagcctcgaacacctaagctcaaaccaccctcctgcttcaacctccagaggagctgggactacaggcgcatgccaccacatccagcttataaaatatatatgcaacaaaaatttagaaaatctaacaatctataaagaagaaaatgaaaaaacccattaattagtaaaccaagataaccacttttacctctttggtatacatcctttcatatatcatatattattaagtctcaaacttggaaaaaccacactttcatgtataggctaagagacttttaggttggcagttaacatgtgaaagcatctaaaagtggctccaaatgaacttctttcttttgagttaaaggcacagatacactaatgatacgtaccaaccaagaaccagtgatgattaaggcacggtttccaccgggtggaaaaaaagattcctgcacaggaggtgcaaactttgcgtagacgccacctctattcctctggttttccatccttgcatgaagaagagaactaggggaaaccaaatttcagtgtttaaagtgtaagaccctaaataggcccttgactctgagataactttgacttaaaaaaaattgtgacaaaaaaacaaagtttaccatcttacctatttttgtttctttattttattttcattataatttttttgagagagggtctcactctgtcacccaggctggagagcagtggcatgatcatggatcactgcagccttgacctcccagcctcaagtgattctcctgcctcagcctcctgagttgctgggactataggcacacgctatcacgcctggctaatttttgtattttttgtagcaatagggttttgccatatcccgggctttgaccatttttaagtgtacaacttagtagtgttaactatagtcacattgttatccaaccaatctctagaactttttcatcttgcaaaacggaaactctatacctattaaacaataacacctcacctcactcgccctccagtccctggtaacttccagttaactttctgtttgaatgaatttgagcactctagatacctcatatatgtgaaatcaaacagtatttgtctttctgtgactggtttatttcacttagcttaatgtcttcaaggttcatctatataatatatgtcataatttccttcctttttaaagttgaatatattccattatgtggaagcaccacattctgtttatccattcactcactgatgggcacctgggttgcgtccatctcttggctgctgtgaacagtgttgctgtgaacatgggtgtgcatgtatctctttgagatcctgctttcaattattttgtggatatacccagaagtgggattgttgcatcatatggtaatcctttttgaaattttttgaaacatcaccatactgttttgcatagtggctgcaccattttatatatttcatcaacaacacacaaaggttccttcaacaatgattgttattttctattgtgttttgtttttgatagtagccatcctaaagggtgtgaggtgttatcttgctttggttttgatttatcttcccctaatgattagtgatgatgagcctcctttcacatgtttatcagccatttgcatgtcctctttggaaaaatgtctactcaaagtgctttgcccattttttttttttttttttttttttgaggcagagtctcgctctgtcaccaggctggagtgcagtggtgttatctcagctcactgcaacatccacctcctaggttcaagctattcttccacctcagcctcccaagtagctgggactacagacgggcaccaccatgcccagctaatttttgtatttttagtagagacagggtttcaccatgttggccaggatggtctcaatctcttgacttcatgatccacccgcctcagccccccacagtgctgggattacaggcatgagccaccacgcctggccagcccttttttttttttttttttaactgagcgacatgtaattttactatgtctcgattcatccaccatgggggtaccatgtaattcatcatttttcaaagacagtcaaaggaagatacagttgaaaatgtatacacagcaacagaagaaaggcaatcttaggccaggcactgtggctcacacctgtaatcccagcactttgggaggctgagacgggcagatcagtcgaggtcaggagttcgcagccagactggccaacatagtgaaactctgtctctactaaaaatacaaaaattacccaggcgtggtggcggtgcctgtaatcccagttacttgggaggctgaggcatgaggatcacttgaacccaggaggcggaggttgcaatgagccaagattgcaccactgcactccagcctgggtgacagagtctttctaagaaaaaaaaaaaaaaaaaaaaggaaaggcaatcttgatctgaattagaatactggctattgtttgttaggaataaacttattttcatataaacaaaactatatctgtgtttgagaaattctcagtgctttatatcaacaaattaaatgtttgtgttaaaatgatatatgtgacaaggctacgtgtaacactttcatgtgatagaaaaatgagtcatgaaattttggagtggaagggaccttaaatatcttgtccaatctcttcatgttacaaataaggaaatcaagccagaggaaggtgatgtgatttgcctgctgcaggttgataggaaaactagaatgaggactcagttatcttgtaacttctggctcaggactcttactattacatacaaaaagccattgttcttctccttccaaagaaggcttctcagcctttgcactcttgatgtcttgggcctaataatcctttattttgtgtggccatcccttgcactggaggatgtttagcaacatccctggcctctacccactagaagccaggagcacttctctgcagctgaaacaagcaagtgtctctggacagtgccaaagggtccctggaaggcaaactcactccccacggagaatcactgcactagaggattaagtatctagtatcccttttccacatcaatttaattctcattttcaagttaaaagtgagtgactaagacaaatcattgaaaggccgtaagagaaaaaaaatgaagataccttctattcaaatcattttataggaatcatcaatttaagagccacctgggaagatgattcctctctctataaaggtaaactcagctaagggcatggtcacaacatttgctacttgcatacattttatcttttactttagcttcgggaccaatttttaagactttcaaaagagagaccagaaatttttttacagccccatctacaaaaaataaacaaagccatatagtaattaatcagattacttgaagcccaaaactactaaagtaaactcattaagcattaagcatttatttgtctgttgctactttttttttttgagacggagtcttgctctgtcacccaggcaggagtgtagtggcactatcttggctcactgcaacctctgcctcccaggttcaagcaattctcctgcctcagtctcccgagtagctgggattccaggcacatgccaccatgcctggctaatttttgtatttttagtagagacggggtttcatcatatcagtcaggctgttctcaaaatcctgacctcgtgatccacccgcctcggcctcccaatgtgctggtattacaagcatgagccaccgtgcccagcctgttgctacttttttaaaacctaaaagcacaaaggggcatggcttatgtacctctatttgggcacataaactaaatcagttctaaatggaactgatttagatcataaggctactgattttgtctaatttgacggaatacctaatatactagaacaactagaaaatgctttatcaccatcattagaaataagactaatattgaccatcaattccctcatcactttatcacacctggcaaatgtgtatgttaacagtttaatctgacctcatgctggcctgagagaagctctgtagggaaaaatcttgaggaactgtcaggccatcagtaaacacatcacagtaactgtgtgcagcatatttatagcttcagaacaagacagggctttttcatcatacatttccaggtctgctgcgactctgattcaaagctaacaaacgtttcagcatatgctaacatttgaattatcaggcctgccccacctagactagattacaggggacctacatgatgtaacccacccacacatttccttcccgcaaaagttttgggttttttttttcctttcttctatttccctttcaaaagtaaaagttcctagaaaaagcaaaataggactataattcatattaatttgctagcgatattacaggctttttacggaatttttagtaggtgaaccgagttttttttttttttttaatgagacagagtttcactcttgtcacctaggctggagtacagtggcgtgatcttggctcactgcaacctctgcctcctgggttcaagtgattctcctgcctcagcctcccgagtagctgagataacaggcaccgggcaccacacccagctaatttttgtagttttagtagagacggggtttcaccatgttggccaggctgctctagaactcctgacttcaggtgatccacccgcctcggcctcccaaagggctgggattacaggcatgagccactgcgcctggcctgagctgagaaggaatggagaaaaatggcctctgaagggccccaagtttccctaaaagtaaaatctgctcaaatttaggctgcaccttgattacttggaactgcctgttgttgtcttgcctcatttaaacatgaggaaactgccccaagtgacacatcgtaacccctatttcttcatatctgctatcttctacagacagtcttgcatttgcaaagatgagctattacgtaatttcatactgcaggcttttactcacttaatatcctccccatagcagatggtggtgtcttcagtcagaagttcacaagcaaatcctatattttcagcagtttctacaatagaataaaattaagtcaaatgtcattcctgctgtttttattttattttattttgttttttgagacagcatctcactcccactgcctaggctggagtgcagtggcacaatctctgctcactacagcctcaacctccaggattcaagtgatctgcccatctcagcaccacccgcagcccccaagtagctgggactacgcaactcgctgccaagccaccaaacaatttgtgttttttctagagatggggttttgtcatgtttgccaggctcattcttactgttgaactgaataattgattttacctagtaatgatattttttagttcatgaacataaccagattcacacaaacacactatttttctatagcaatctgtaggaatcacatgcagaagaaaaatccttttctccataataaaacaagtgaaagtcaaagtctaatttgaaatgttttcaataataaaatgtgctatattatcaaacatataaactggttatttagtaaaccaatgttcattaaattactaaacactctcagttcctggttcaattactctgttattggcggggggcgggggcagagggaagcataataatttccaccaacccttacgtgaagattttttttccttttaaattaccacccaatttggcatttatttaaggtcagggctgtgcttcccataactttgcagagtgtgtaacccgttgacgatttcagcgcaagagacattatttgatttcttgtggaaggcttacaaagtaaagtatcaataccaaacaagtgcttgttgagttctaaagttaaaaaattaaaatcgttctttccttaggtatacaattttattgccaagcaataaaattggcaagaaaaccaaagttattgttcagtactttgtattgttctactctgtgcccaccaaatgtcaaagcactggaaggacagagggacaagagggatggccctttcaggacgggaacccacgtctggctggagagataagaccaattataatcagcaagacatggccaggagctaaattataaggaagaaactgctactgagggggatcaggaaaggatgcagaagaatgtgctggaaaaacagaggagggtttctcagaaaaagcatcttccgtccaaagaaacagtgtttgtacaggatgaaaagtctgaggaggtcatcttgggcaaaggaaacggcagctataaatatttgtgaattaacagatatgcttccctgcacaatgaattaccctttttgtctccagtaagcacccagatcttaatgtcagcttttgcaagttttgaaatggtttctggaactccatcctgtagcttgtcttcaatagctgtagctcccaggagctagaatgtatattaaaaaaaaaaaaaaaaggaattagcaaacaaaccaaaagttttctgtaattacaggttgccaacctgtaaaaagaagggctaattatacatcctggttgctgctctcctggggccaatggccagtgttaacagggaaggctgccatgtttcacaattactgcaaaccaacacacctaaaaactttttccctaaaggatgaactatttaatttaccaagacaaaaatgcaagtacaaaatcaaggatgttaaaaatacacttttcttgtgtatttgtggctttatactgacataaaccgtaaaccagttgcaatactagctatttgttgaatattttccacttatctaaaccctacaaaaactatgtattaaatttggaaaacttttagaaacaatatatttttcttatttcaagattttgcagaatatgaattgtttcggtaattcccccaatgtaataagtattagatgcaggtttgttattgtttaaaaattataataaattttaataagtgatatacaaattatggaattaaattagaacttctcctaatgtattttgtcttttggtttctcataatggcaacttctgttctgctcctattttggtgaataaaagaaataaccttcttccattgtgccagtgtcaaatgctgaagttacaattatctcttaagcatgagatcaaatattcaataaaacttaataaaaatttcaattctgcttagaatatcaaagaaaaagttattaaggctaaaactcacaattaagtctttttcaatctcctcatatactttatccagagcttcgtcccggttggtggaggccacactggcagccataaactttttattccattctgtaaattctttttcttcaatttccttgtagcaaaggcatagggttctaagagtttcatttgcaaagatctgttttatttaaaaaaataaatccaccaatgcaaagaatagttaatttatgtaattcaggatcaagtctgaaattttactttgaagtaatatactaacagaatttaaaaagagatcattaaacatgacagattctgtacaaatacactttagagaggggattaaatgtcactttttttttttttgagacaaggtctggctttatcatccaggctgggatgcagtgatgcaatcccggctcactgcaacctctgccttccaggctgaagccatcctctcacctcagcctcccaagtagctgggactacaggtgtgcaccaccacgcctggtaatttttgtacttttttttgtagagatggggtttcatcatgctggtcttgaactcacgagctcatgtgatctgcccaactcagcctcccagcgtgctgggattacaggcatgagccactgcacccagcctaaacatcactttataatagactttgcttttctaaacttctatagggtccaggactgcacttccagtttccaaagggaaaagcttacctttcttctaaatcttctattacctttctcattttctcattttctctttttctcttcatgactaggaaaatatcagaccaagggagctgccttggggtgtaatgacataagcacgaacctgacaactttataacttgttccaacaaactgtgatacaagtccaatcacctatgaactctccactaagcattattccctcaaaccaattctaaaatacacaagccattgttaaagctgaggtcaaagcttttaatggaaaagagtatctggcaattttcccatgatgaacgattcaaacattttctttttttttctttttctttttcttttttttttttttgagatgaagtctcactctatcgcccaggcttgagtgcagtggtgcgatctcggttcactgcaacctctgcctccctggttcacgccattctcctgcctcagcctcctgagtagctgggattacaggcgggtgccactgcatctggctaatctttgtatttttggtagagacggggtttcaccatgttggccaggatggtctcgatctgttaacctcgtgatctgccacctcaccctcccaaagtactgggattacaggcgtgagctactgcacccagcctgatttaaacattttaaacagtttcaacatgaaccagtaaacatctcattactttatagtcacatcttttttattttgaccaagttttgctcttgtcgcccaggctggagtgcaatggtacgatctcggctcactctaccccctccctctggggttcaagcgattctcctgcctcagcttcccaagtagctgggattacaggtgcccaccaccacacccagttaatttttttgtatttttagtggagacggggtttcaccacgttggccaggctggtcttgaactcctgacctcaggtgatacacccgccttggcctcccaaagtgctgggactacaggcatgagacaccaaatactcaatcagttgaaccgcttctgccatcttggctagacaagatgtgacctatagtcagctctgtcatcctgtcacatatgaatgctttccttcctttgcactacaacttgaagttagtggaggtcttggggaccacacacatagtaagactacaacctagtatggttatgtagcttgctcaaggccactggaagagagctaagccattcccctgcctcagtcctatagaccttgaagacccacatgctgggagagggcaccatggtgatatcccaggaagtcagtggcaggggcagaactgggacccaggtggctgtattcctactttactgctctttccaccccaactattgcaaagcaaagggagggtcagcagttaacatacagctttcatgcaaacttaacagacagcatcagagagtaagttcagaatcccttgcagaaagaataaaagtgaaacttacatccagggcatcctgtgtttcttgcttagtaggattcattcgatgtaaccgttcataaataacagtgtcagcacctttacagtaaagcttgatattgccttctggggttcttactggtagtaaaagaaggaaataaacacaacaaagtttgattttttatatatatattttttgagacagggtcttgctctgttgtccaggctggagtgcagcagttcagtatcggctcactgtagcctcgaccccccaggctcaagcaatcctcccatctcagcctcccgagtagctgggactacaggtgcatgccaccatgcctggctaatttttatttttatagacattggaggtctcactatgttacccaggctggtcttgaactcctgggctcaagcaatcctcctgcctcagcctcccaaaatgctgggattacagatgtgagttaccacacccagctaagtttgattttttaatagaaaactacatttataaagttaatttgaaatgttactatctcataattcactgttagcttaaaaccatcagttcctctagaaaagtgttgccttcaacaaaactggtaagtcattatctacattgaatgtaatagtgaaataaatataaaaagattccttcacagtcagctctgttttttataacctcagttattcttccaacaaatatttactgactccctaccatgtgctatgccatgttctagttactttcttttgtagactttttctccatccaaccaacaggtagtttctcacctatgaactcacaacacttactgcttttaatacttcgaccacaacaccactcctaatgaccattttttttgggttttttgattaatgcaataattgtaatacatccctcactgttaaccagattttaaatcaaggtagatggcaagcatgataatcagtctagatctgtgtaagggacacagaaagcgttcagtaagtgtgcctaaggagggtgtaatagttaaacctgtatatttttattggttaaaaattcaatcatagtggagaaggcttgtagataccaccttaaccaagtgatcaaagttaacatccccattaatgagacaaaccaataatatataccttctggctaggcagggtggctcacgcctgtaatcccagcactctgggaggccaaggcgggccagtcacctgaggtcggcagttggagaccagcctgaccaacatggagaaaccttgtttctactaaaaatacaaaattaaccaggcatggtggcacatgcctgtaatcccagctactcagaaggctgaggcaggagaatcacttgaaccagggaggtagaggttgcagtgagccgagatagcaccattgcacttcagcctgggcagcaagagtgaaactctgtctcaaaaaaaaaaaaaaaaaaagtatatatatatatatatatatatatatatatatatatatatatataacatgtatatacacatatatacatacatatatctacatatatacacacatatataaatacatgtatatataaatatacatatataaatatatgtatatatatataaatataaatgtgtgtgtgtgtatacaccttctgatgtgatacttaaagaaaagcacagcatcacttacggactcttcctgccaacaatgtgtaacctagctctaatcatgagggaacatcagacaaacgcaaatggagggatagcctataaaataaccagcctgtgctttttaaaaatatcaatggatgaaagatcaaaaagagattgaaccgtccttgactcagagtcatgatcacctaatataacctgtgatcttagattggatcctggaccagaaaaacaaagaatgaacctccctggtaaaatctgataaagtctattgattagataatattgtactgtgttaaattttctggttctgaacattgcactgtatatataagtgagtgcttctgttcttaggaaatacctactatggtatatagtacagtatttaggggaaagggacattaggcctgcaatttattctcttttttatatttttattttctttttttatcatgtaatcttgctccttctaacgcaatttactctcaaatggttcagaaaacaataacctgtatgtatgtgtgtgtacatatatatgtgtgtatatatataggtatatataatgaaattacatatatataattagatatatattagatctatatatagagatatgtaaatgaaatttcattatgttaacaattggtggatatggaagagtatgagggctctttaaaccattcttgtaacttttctataagtttgagattatttcaaattacgaatttaaagcagttcagtggtaggaagtgattttcatcttcacttggtggtctgttatgtgcctgcattgcagatatgattttgattcataagcatagctttgcttttctcagaaatcttttcctgctgagtcctcccttccctgccatcaagtacagaagagagcactcagaggtgctcaaaaaataaaagagcatgtgttgtttaaaataaaagactgctacaaatgtctacctgctgcttcagaaatgttccacctgctgccccagattcagcatctggcagcccacgtggttaaagaatgtcagcagctgtaatcccagctactcaggaggctgaggcaggagactcgcttgaacctgggaggcggaggttgcagtgacctgagatcgcaccactgcactcctgggtgacggagcaagactccatctcaaaaaaaaaaaaaaaaagaaaagaaaagaaaaaaaagagagggattaaaaaagaacgtcagcagcatttgcaagattcagagatactgtggctacccctttgagtagggaacacagtgaagaatgaagaaaacaataccagtttcttttttttttttttttgagacggagtcttgctttatcgcccaggctggaatgcagtggcgcgatgtcggctcactgcaagctctgcctcccgggttcacgccattctcctgtctcagcctcccgagtggctgggactacaggtgccagccaccacgcccggctaattttttttgtatttttagtagagacggggtttcaccgtgttagccaggatggtctcgatctcctgacctcgtgatccacccgcctcggcctcccaaagtgctgggattacaggcgtgagccaccacgcccagccaacaataccagtttcagtaaagctgcagaaatctcccaggagccaagtagctctttcactggctgctttatcctgatgccactcaatacaatgggcacaagcaacatctaaatgagcgattcatagacagactctgagggggacttaccaatgatagacattcgcttccggtcactgttgaagtccaaaatggcaagaacattgtaagtcctttcagtgcccagttcactgatggtgatggtgttctgggtcctggcgaggaaggcaaagccaaagttcctggcagcgtttaccagggcaccttcatcgggagaggctgcctggtagttgagctgacctaacaaggaagcgagagaaatcccagaaaagctgtaaaaacaaatgcagagctcattgttgaggcctctgctgaggctcctgtgggggtcagatgggctgcaaagcccaaaacatccccaggaaaacgagtcattgacttggaagggttatgccaagattaaaacttctttgttttatcttgacttataaacagtaatataaactaaaaaagaaacattggtggagaatgagggaaaattcccataatcccaccatccacaggagaaacaacaggtgttgacattttatcattccctccagtgccttttaaaatgtctgtatctgaaattgtttctatcaagctgaatatacatttacatcctgattattttaatgctgtatctgagcatattgccatccctttttaaattctttataaacatttgaacaaatgtaaatatgttatcattttcccattacagacacttaatttccaaatttttttactctcaaaaagtcacactttaataacccttttgtatgtgtgtaaagatttttctgtttcttttttctttttagagacagaggtctccctatgttgtccaggctgctcttgatctccggggcccaagtgatccttctgcctcagcctaatgagtcgctagggctacaggctcatgtcacctcacctggcttattctctttctttcttgtttttctgaaacagggtctcaccgtgttgcccaggttgcagtgcagtggcacgatcatggctcactgaagcctcaatctccccaggctcagtgatcctcctacctcatcttcccatgtagctgggattactggtacacgccaccacacctggctaattttttgtattttttgtagagacggggtttcaccatgttgctcaggctggtctcaaactcctggactcaagtgattcgcctgcctcagtccctaaagtgttcggattacaggcatgagccactgcccctgggcccctggcttattttctaagagcagattcctattaggaaaatactgagccagagaacactgataattttaaaactcattggtatacaatactaatttgttttccaagaaggttgtaccagtttatcttccctctaaaaaagtatgttttctttctttctttcttttttgtttttttgagacagtcttactctggcaccaaggctggagtgcagtggcaccatctcagctcactgcagccttgatcgcttcaggcgcaagtgatcctcccacctcagcttcctgagtagttgggactataggcgcacatcaccacgcccagctaatgtttgtattttttgtagagacaggatctcaccatgttgcccaggctattttttctttaccatagctatattctccttattaaaaaaaaaaagaaaaaaaaaccacacaggctgggtgcagtggctcacgcctgtaatcccagcaatttgggaggctgaggcaggtagatcatgaggtcaggagatggagaccatcctggctaacacagtgaaactctgtctctactaaaaacacagaaaattagccaggcatggtggcacgtgcctatagttccagctactcgggaggctgaggcaggagaatcacttgaacccagaaggtggaggttgcagtgagccgagatctcgccactgcactccaccctggtgacagaccgagactccatttcaaaaaaaaaaaaaaaaaaaaagaaagaaagaaaagttgaaacaaaccaaccaaccttagtttgatcactatccgatatcttaatgtttaaaagttaaataatggaaaattgtcttctattcacaactacatttcaacaataagaataagctaggttcagtggcacgtgcctataattgcaactattcaggaggctgaggcaggaggatcacttgagcccaggagtgtgaggttacagtgagctttgatattccactgcactccagcctggctgacagagcaagatgcagtctcttttaggaaaaaagaaaaaaccaataagaagaggaataaatctcacagccagatacacaaaagagtacatatgctacatgattccactgaaataagccaaaaaactgacagagctaacctgtgttattcgtagtcaggaaagtacttttcttgtaatcactggaaaggaatgtaaagggaattctagggggattgataatgttcttttttaaaaatctgggtgctcattacaagagtattggtttgtgaaaattcattgagttatatacttatgatacgtacatatctctgtatacacatgttgtacttcaataaaaagtttaaaaaatactctgcctacccaagatcttctatttttctactctagttattttgtctcaaaatagaaggaaaagcatttccgtggccagatgactttggacagaaagagcatttagttttccaaaatactttgaccaggatgaaggccacagatgcatgagcagcctcacttggaatggttggtgctctggggtaacggtggcagagagagctaaacacaccttccttccttccttcacaattggctcagaggattcactttttaagtcaatattaatcacttcctaattaataattaaagatgacacttagggtctctctgtatttgttcactcagaaagtcattcactagaagctataaacgcacttcctaaatccggccatctagcaatcatatacaaatgctagagggcaaactatttaaccagagacaaatcagcagcggtgagaacaaagcctttcccttcggcaacttaagttggcacagcgatatatggcataatattgacagcaaacgcatttccagcagagaaaaggaacaaaataataaaaagtggtaaagttcccacaagtaagacactcatatctagagcaaacaccttgatatttttatcattaaagaaaaaaaaatgttttccattaccttctgataatggaatcacagaattgcagactaacagagatgggaagaacgtcagtgacttggtccaaattccaaccttatgactgctggaagacacttggactaaaaaactatgcagccataaaaaggaacaaaatcatgtcctttgtcacaatagagattaggccattatcctaagcaaattaactcaggaacagaagaccacatacctaccacatgttctcacttaacattgggtactcatggacataaagactgcaaaaatagatagtggggacttcaagagaaaggagggagggagggcaacaagtgttgaaaaacttactattagggcagggcacggtggctcacacctgtaatcccagcactttgggaggctgaggcgggtggatcacaaggtcaggagtttgagaccggcctggccaacatagtgaaaccccgtctctactaaaaatgtaaaaaattagccacgtgtggtggtatgcacctgtaatcccagctacttgggaggctgaggcaggagaatcgcataaacccgggaggcagaggttgcagtgaaccgagatcacaccattgcactccagcccaggcgatagttcgagattctatctcaaaaaaaaaaaaagaagagaaaagaaaagagtgtggtgttgatggtatagtggtgagcatagctgccttccaagcaattgacccgacttcgattcccagccaatgcagcaggctgaccttttgtcctggctaacatggtgaaaccctgtctctactaaaaatacaaaaaaaattagccaggcatggtggcgggtgcctgtagtcccagctacttgggaggctgaggcaggagaatcgcataaacccgggaggcagaggttgcagtgaaccgagatcacaccattgcactccagcccaggcgatagttcgagattctatctcaaaaaaaaaaaaaaagaagagaaaagaaaagagtgtggtgttgatggtatagtggtgagcatagctgccttccaagcaattgacccgacttcaattcccagccaacgcagcaggctgacctttcgtcctggctaacatggtgaaaccctgtctctactaaaaatacaaaaaaaattagccaggcatggtggcgggtgcctgtagtcccagctacttgggaggctgaggcaggagaatgcatgaacccgggaggcagagcttgcagtgagccgagatcgcgccactgctctccagcctgggcaacagagcaagactctgtctcaaaaaaaaaaaagaataaaaaagaaaagaaaaactaactattaagttctgtgttcactacctggatgatgggatcaattgtaccccaaacttcaggatcatgcaatatacccatgtaacaaacatgcacatgtatcccctgaacctaaaataaaaattgaaggtgtaaaaacaaactaaaaaaacaaacaaaaacaaagcaaccttcctaagaaaactctttatttatggcacatttagaggcaaccagaaagaccttctttttctttcacacactaatttgtggctcatgaaattgatgtaatcaaagaaagatgctcaaaccacaaatcccacctctcagttctcatcaacctgattccctagcttcagggtaatggtggcagagaaagctaaatgcacctttcttctctccttcacaactgcctcagctgattcactctaatttctttttgagatggagtctcactttgtcgcccaggctggagcgcagtggcaaaatctcggctcacagcaacctccgcctcgcgggttcaagcaattctcctgtctcagcctcccaagtagctgggactacaggtgcccgccaccacgcccagctaatttttgtatgtttagtagaggtggggtttcacaatattggtcaggctggtcttgaactcctgacctcaggtgatccgcctacctcagactcccaaagtgctgggattacaggcgtgaatcactgcacccggctcactctaattaagtgacaataaactacctggccaggcatggtggctcacacctgtaatcccagtgctttgggaggctgaggcgggtggatcacctgaggttaggagttcaagacaagcctggccaacatggcaaaactccatctctactaaaaatacaaaaagttagccagggtttggtgtgggcgcctgtaatcccagctactcgggaggctgaggcaggagaatcacctgaacctgggaggcagaggttgcagtgagccaagattgcggcactgtactccaacctgggcaacaggagcgagactcagtctcaaaaaaaaaaaaaaaaaaaaaaaaagactgggtgtggtggctcacacctgtaatcccagcacctttgggaggtcaaggctggaggattacttgaggtcgggagtttaagaccagcctgaccaacatggagaaaccccatctctattaaaaatgcaaaattagctgggtgtggtggggcatgcctgtaatcccagctactcggaggctgaggcaggagaattgattaaacccgggagacggaggttgcagtgagccgagatcatgccattgcactccagcctgggcaataagagtgaaacttggtctcaaaaacaaaacaaaacaaaacaaaacaaaacaaaaaaaaaaccacacacgctcacaaaaacaagccctagctctcagatgtctttttctcctcaatcctctcaccccctttaaatgatttgccaagtgtctcccacatccatggctttgttatccttcccaaagaccccatactaatgcaaaccttcagcctctgtgccaatctccagtgcctacctgctccagactctcacacccgtgatgcgcaaaactcctgaaacaagctctctgatcattaactcagaacctccaggtgaagtgaaggcttccaagccttccacattctgctctcacatgacctctgtgcaggcgggagtctgcaatggcctcaaggttcccatcccagtgctgtacattcactttctcccatttactcaatcaagcactaatctaggtactgctgtgaagggaatttgcagatgtgcgatcctaatcagctgaccttaaaatagattatccaggtgttcctgactgaattagatgagcttaggacagaactcttcttggggagagacttggagcagcatgaaaaaggttcaatttaagggagattctccaccgctggctttgaaggtgaagtggaccagctggcagggaatgaggacagtctctaggagtggagggcaacccagttgataaagaataaagaaatggggacttcagttctacaaccacagagaactgaatcctgctgcaaccacacgtgaacgtggaaaaagacactgagctccagatgagaacatggcccaaacttgattttagtcagatgctgagcggtgaacccagtcatgccatgctcagaattctgccctacagaaccgtaagctaatgaacaggtgttttcagtagctgagttacactaattcactacagagtagcagaaaacaaatgcatgtggcagggtgtggtggctcacgcgtgtaatcccagcactttgggaggttgaggtgggcagatcacctgaaatcaggagttggagaccagcctggccaacatggtgaagccccatctctactaaaaatacaaaaattagctgggcgtggtggtgggcccctgtagtcccagctactcaggaggctgaggcacgagaattgcttgaacctgggaggtggaggttgcagtgagccgagatcatgccattgcactccagcctgggtgacaagagcaagactgtctcaaaaacacaaaacaaaacttgaaggtgtagtccccaaggtccctttcaagggatcctttcctggtactttatggttaaaagccgaaagcaatttctttctctaagctcctgcactagaagccaacatgtctctattcgtacaacccttgacctcagctgacagtggacaaagagctgcggtatgtcaggctggagggactttgtgttatttttttttttttttgagatggagtcttgcactgttgcccaggctgtagtgcagtggcgtgatcttggctcactgcaacctctgcctgccaggttcaagcgattctcctgtctcagcctcccaagtagctgggattataggcacatgccaccatgcttggctaatgttttgtatttttagtagagatggggtttcaccatgttggccaggctggttttgaactcctgacctcatgatctgcccgcctcggcctcccaaagtgctgggattacaggtgtaagccaccgcgcccagccctgctggaaggaactttgtacatccaaccttcttactacaacaccgaggaaggtggttctcagagagggacccagactgggctgactcatctctagcatgtagtccagggctcttcccataatatcccactggggaaagatagaatagggaccacaggatgaatttacatttgcctaagttggccagttagcccttaaaatcctatcacgtacccagagaagagtacaataattgtgcttatgagtcaaaaccaaagagaaccaggtgactttgtaatatcatactttatgcttattgcctgggtaaaattggcttggtgagtcaaatagacttagacctctgcttccatgattcaggacctggtatcgcccctttctatccttccccacatcatctgctgataaacccttccatgtatccaccctaatctgaactctgttaccttgcttcattgcaatattagattcatccttggaaaatgggtttctttgaaacttgctgaaaggtatcatgtacagcttctatacatttaggtgttttttgtttttttttgagatagggtctcactccatcaccgaagctggagggtaatggtgagactatggctcactgcagccttgacctcctgggctcaagcgatccccacctgagtagctgggactacaggcatgtcccatcacacctggctaattttttgtattttttggtgagatggagttttgccatgttgctcaggctggtcttgaactcttgagctcaagcaatccattcacctcgaccttccaaatgctgggattacaggtgtgagccaccaagcgttggcctacacatttagtttttatgcatattccttctctggaaatttcatacctgctacatatgaaacattaaggttgagaaaagagagggacttatgtatgccgcactgactgaagtaaaaagtggaagatgtagtgaagtggatgaagtgagggaatgaagtgaaggcagactacgctttattacagaaacaccaaaagaactccttttgctctttctataaagtgcatgtgtgtctatataatttatcattatgtccatttgtgataaaatgactagctttccttgatacaggacaaacttgctgtgacaaagctggcacaaactgcatcgaaggattctgcaaaggaacctacaagccattctggcttgttcccatgaaattcacattaattatgctcctttaaatggaaaaaggcaccttaaagagatccaggctgaggctcatattatttcaaacccaaactataacagaatctagtaaataagagcatatatctgaaattatttggtagaaaagattagtcaagttcaaagtccatttctgatacagataaagcttgacttttcactctcagtcaatgctcagtaataaatgtgctaagaaaagttagtttcttctatcatagttcaagtaccaatcatttctttcaacaagatttcatttgcaaagtgaaaaaaatacacctggagctatagctatgaataagtgtaaattttcagggacaagaagcttgtttcctactttgctcttccataaaccatctagtggtaagtgctgagaaatattcactgcattctaatatgagacagatttgtgtactacttgacatgcatttgagccataagcaggagttacctggaaacaaaaaacctggtctctaatgcctgagatgccagagaaacactcaccatcagtcctatccaccatgactgtgtggcaaactgcgagcaagaagaagaactgtcgtacttctggctctttccctgactggatttgctcaataagatagtggtcataaaatgcaagcttcccatcagcatatgtattccagctaaaatcaacttgctgaaagaaatggagaaaaacaaaatatgattttataaaatatttttgacttaacaaatgacatgaacttttcttcaaaggcaaggtttcaattatgcaaaaaccaccttaggattttagcacattcttaaatgtcaagaggctcacaactgtcttaaataaaaagctccccccctttttttttttggaaacatatatgaccatatatgggtctcactctgtcacccgggctggagtgcagtggcttgatctcagttctctgcaacctccacctcctgggctcaagcaatccttctgagtagatgggcctacgggcatgcaccaccatacctggctaatttttgtatttttttgtagagatggggtttctctggtctcaaactccttgactcaattgatctgccaaacttagcctcccaaagtgctgggattacaggcatgagccaccatgcctagtcaaaaggtactttgtggtggactaaactatgttcccccaaaagatatgttgaaattctaacctctggtacctatgaatgtgaccttatttagaaacagggtctttacagatgtaatcaagataaaatgaggtcatactcaattagggtaggtcctaatccaatgattggtatccttattagaaggggaaatgtggacagagacacacagacacacgggggacaccacgtgacaacaaaggcagagacacagagttgtgtttccaagtctccaagccaaggaacaccaaggactgtgggcaaccaccaggagcagggaagaggcaacgaaagagtcttccctagaccttcaaaggaagcatggccctgctgggaccctgacatccccagcatcccaaacgattcttcggcttaaaggtcttacctctattttgttgtggttgtgttgagaggcatcccgatggtcccctgagaaacaaacaggacaaaacaaattgattctacacctatgtccagaggcccctccttacctggctttgcttatatagtgatggtggtaagaccatatacggcctggacaggctaaaatatttattatctggcactttacagaaaacgttagatgacccctggtctagatattcaaataccagtggctgtccctctccactaccttctcctaggggcctgaatcatatcctttgaaatgctttacctctcccaagtcagaaggactcacatatgtgagccacgtcctcagcccctcagtgccctaccatcttcactgatacttcttatgagaaaaggcactcacggtgcctacaagtaggaagtatatatgcatgtccctatatcattttaaacaattgtgctattaagtatatttaaaatagcactctatttgaatctagtattagccttaatattatctctaaatttacataaaattaaatttctaaatgtttcagaaaattagaactgaaatcaacttttaaaacaattggctgggtgtggtggctcacacctgtaatcccagcactttgggaggctgagatgggctgatcacctgaggtcaggagttcaagaccagcttggctagcatggtgaaactccatctctattaaaaatacaaaattagctgggaatggtggttcatacctgtagtcccagctactcgggaggctgaggcagaagaatcacttgaacccggaaggtggaggtttcagtgagccaagatcgtgccactgcactccagcctgggcgacagagtgagactctgtctcaaaaaaacaaaaacaaaaccaaaaacacaattgtaggccgggtgtggtggctcacgcctgtaaccccagcactttgggaggctgaggcagatggatcacttgaggtcaggggttcgataccagtctggtcaacatggtgaaaccccatctctacaaaaaagcaacaacaacaacaacaaaaattagccaggcatggtggtgtgtgcctgtaatcccagctacccaggaagctgagggaggagaatcatgtgaacctgggaggcggaggggttgcagtgagctgagatcgcaccactgcactccagcctggtgacagagtgagacactgtctcaaaaacaaaaacaacaaagaaaacaaacaattgtagtgaaatacacataataaaatttaccatattaaccgattttttgtttgatttttttgagtcagggtttcactctgtcacccaggctggagtgcagtggtgcaaacccagcccacaacagcctcgacgtacccaggctcaggtgatcctacctcagcctctcaagtaactggaactacaggcacacacaattttgctcactgcaacctccacctcccgggttcaagcgattctcctgcctcagcctcctgaatagctgggactagaggcatccaccaccacgcccaggtaatttttgtacttttagtagagatggggtttcatcatattggccaggctggtctcgaactcctgagcttgtgatccacccacgtaggcctcccagagtgctgggattacaggcatgagccactgtgcccggccagagatggggttttgtcatgttgcccaggctggtctcaaagtcctgggctcaagggatgtgcctgactcagcctcccaaggtgctgggattgcaggcgtgagccactgcacaccagtcaaccaatttttgttgttgctattttgagacagggtcttgctctgttagccatgctggagtgctgtggtgtgatcttggctcactgtagccttcaactcccaggcttaagggatcttcctgcctcagtctcccaagtagctggaactataggcatgcagcaccatactctgctaatttttaaaaatttttgctttgttacccaagctggtctagaattctgggcctcaagcaatcctcccaccttgacctcccaaagtgttgttattataggcatgagacactgcacccagcccattttaaccacttttaagcatacagttcagtggcatcaagtatattcacactgttgtgcagctgtttcatcttgcaaaattgaaactctgtacccattaaacagtaactcccaattcccctgactccagcccctggtaaccatcattctgctttgtctctataaatctgattattctaagtacttcatataagtagaattatacaacatttgtccttttgtgactggcttacttcacttagcataatgtccttaacccatttatgcctagtgttccattattggaacgctaagcatgtgggagttatttatatcctactgctcaaggtcatcaccaagttctgattgcaaaaattcaaaaaattgcaacctctggcataaacgagttcaggttcatctgtgttgtagcatgtgtcaaattttccttcctttcttagactgaataatatttcattgtgcgtatccacattttatttatccattcatccattgatgaacgcttgggttgcttctatcttttggctattgtgaataatgctgctatgaacataggtgtacaaatatctctttgagcccctgtttcagttcttttgagtatataacctgaagtggaattgctagatcatatagtaatgagacttctaattttttttttttttttttttttttttagacagagtcttgctctctcaccaggctggagtgcagtggtgtgatctcagctcactgcaacctctgcctcccgggttcaagcaattctcctgcctcagtctcccgagtagctgggattatagctgtgcgccaccaccacacctggttaatttttgtattattagtagagacggggttttgccatgttggcaaggctggtctcaaatccctgacctcttgggatctgcccacttcaccctcccaaagtgctgggattacaggcctgagccaccacgcctggctgtgagcccacttctggccactgtcctctcccacgcatgtgtccccagtgctgtccatggtgctcctctggtgcttagctggagaatggccctagcagcaggactctgcatcgagagggcaccagcaatgccaggagacaggctatagtccaagtaatgacctgcacacggcaggcagccccactcacccagaaaatgagtgacggcttccacttaccatatatctgcccgttgatacagcactttttaaaggtcatgatattttgtgtgagtgtccccgtcttatcagagaagatataatggatctgcccgagctgttcattgagtgtggtggttctagcttttgcgggtgtgtccttctcagcatagtacatttgcaggtcccagttgatgaagtgactctgtccaagacgaatcacttccacgctaggaagacagaagattattttccgtagagagctcggatacgagtggcaagtagtagagattttattctcattgtacagacgagagcaagctgcttatttactgctatggtctgaatgttagaatccccctccaaattcatatgttgaaacccaatccccaattcaacagtattgaggtggggcctttagaaggtcattaggtcatgagggctccacccttatgaatgggattagtgcccttattaaagtggctcaaaggagcttgcttgccccttctgccatgcgaggacatagctagaaggcaccggctgtgcctataaagcagaaagtgagcctttgccagaccctgaatctgccgatgctttgatttgagacttcccagcctccagaactctgagcaataaatttcgaaggtcttttgttatatcagcccaaactaagccctctacaaggagacaagcccatgcactcagcctctggtttctcctaaccacatgcatcattctcaggcttcagggtcaagctgattttagacaagtaatttccactcaaaattgctcagtgagatttcccactcactcctgggcacatttagccaaggcacccatgttcagaatacacagcccagcagaatggaagacacagcaacactgcagacagagcagtggacacagcaagcttgactcttcccccattccccatagcacccaggggcactggaatggccatgttcacctttgccctaagtggtagggcagagggagtgagagtaccctagggtacagactccactgtgctctcaaacagggcaaaaggcttttggcaaataccccaaatcatgatccctaaattatgataaggttatagaatatccaaaataagatattataaaaggatcatctgaattttaaaactataagggacattacctatctcagttataaggaagctgtttacatagccagcaattgttaggtgggccaaggaagtccttaacaagttaaacagatggaaaaatgatgctctccccacttctctcccttccgtaagtatttcctaagtgcctactatgtaccagataccattctaggtgcaggggacatgtctgtaaacaaaacaaagtcctttctcttaaggaggttactttctagtagagacagacaaataaattaataaagagaggctctatcagaggtgaaagttctctgcagaaaatcaaagcagggggccaggtgtggtggctcacgcctgtaattccaacactttgggaggccgaggtgggcggatcatgaggtcaggagttcaagaccagcctgaccaacatggtgaaaccccgtctctactaaaaatacaaaaattagccaggcatagtggcatgtacttgtaattccagccactaaggaggctgaggcaggggactcacttgaacccagcaggtggaggttgcagtgagctgagatcgcgcgactgcactccagcctgggaaacagagcaagactctgtctcaaaacaaaacaaacaaacaacaaacaaacaaacaaaaatcaaagcaaagcaaggtaaggagatatgaagatctccaggaaggagaagtggtcagaaacagaatgagtcaggaaaggtcagggtaataaggtgttgtctgagtaaaggcctttgtagtgaaaggggagcagatagatacctatgtaaggaatgcccctggcagagaaaagagcagggacaaaggccctgtgcaggaagaatatcaaggggccagagtggcagaagcccagggaggtgggctgaggtgcagaaggtacgggcggagtggaaggctgagcaccagatcacacttggggccctggggttgggtttattctgaatgaggtttgaagtcaaagcagagatactatctggaagaacttgctccagcatgttttcaaaggacctttatctccaagaaaaaagaaatcgtatttgtcacatgacatacctttatataaaattatgtatacagtttcttttataatacacattgatggttttaggcaaaattatctatgtaatagttcccttgacaaaggtaacactcaactcggtttttctcaaagtagctgtggaacagatggctgccccagggctttccttcatgttaaaagaacaacagtaactacatgtaatcaaattaaaaataaagcaaatgcacatataatgacactaaaataaaataaatgcctctaattataggtgtgtatgtgattcctatgtctctgggctattctttatcagaactaagaatgaactctggctgctgggtttattccaaagcactatccctcccaaaaaggtctcaaagtcagtttggccaagggcagtgaactttcatattaaaaagagaaaaaggccgggtgtggtggctcatgcctgtaatcccagcactttgggaggtgaggtgggcagatcacctgaggtcaggagttgaagaccagcctggccaacttggtgaaacctgtctctactaaaaatacaaaaaagtagccagacatggtgatgggcacccgtgatcccagctactcaggaggctgaggcaggagaactgcttggatccaggaggcagaggttgcagtgagcctagatcatgccattgcattcctgcctgggcaacaagagtgaaactccatctcaaaaaaaaaaaaaaaaaaagtaaaagtaaaaaatgaagaagtatcaccaaatcagctgcttaccacttatcggagatatgcccctgactttgttgttgtggttgagatttgagatgaaaaagagaacattttgagaggttgatgaaggacagggagtttctttcctactaggaggtagtggccggaaagcacaagttctccaccttgggtgtggcagatgataataaaggctcagataagaggtgaggaccacttccaaaagggaaaactaagtttttccatcacctgctaaatcttcccctcctcccagtccctttctgaagtctgggctttggaacccggtgagaagggaaccttactaataagacaatgactacaggagtagcaatcgatctttgaaattccctacccttatctgcaaacaggatgagataaaaggtgcctggcacagagtggatactcaaatgttaatttccttttcctctcttaccctcaattctgaaatgaacgtgattttcttacctgttctttgtgacctttgaaacagtgatcactagaaatgaaggcactatgttgggagaaggtacaacattcttccattaaagcaaaatgccagagaggacagccttacctgacatagagagagatgggtaccatggtgttgagaacaatgatatagccccagaaaatgaggaatccacggtaggagggtgtatcgtcttctccatcatagaggtaccaagaggaattgcccacctgtgcttcccaataagcatggccgatggcaagaccagcagaaagcagaataagaacaacaaagatctagaagacagaaaacatttaaatgcattctgaagatggatttccaacctcttgcatttcctagatgctaattaaccttactcaatacttcatatgattgagaatttagtagtctgaaaaataatatatgtcaaataaaaacagcactatcataacgctttgaaagtctatttgattgctgcaattgactgatgtatcctacatctcccatagaaggtaaggttttgttcccaaaattatctctccaaagagaaggtggtgtcttatattcaaatccttgaagaatcttatattacagggcattctctcaattacgtttactttgaacaataacatactgtttggggaagatatcttacttagcatgaaacaacttccaacaaggctgaactggaaaactggaatgcttatagaagatattcaacagatttttttttttttttttttttttttttttagacagcgtctcactgtatcacccaggctggagtgcagtggtgccattgtggctcactacaacctccacctccctggttcaaacaattcttatgcttcagcctcctgagtagctgggattacaggcacgcgccaccaaggccggctaatttttgtctttttagtagagacgagtttcaccatgttggccaggctggtctcgaactcttgtcctcaagtgatctgcatgcctcagtctcccaaactgctgggattacaggtggccctcacccagccagaatttttttttcagggcaagaaaatttcacctatatttgggcgattattccttaaggtgtaatgtcataagtattgcatgacattgtaaaataagatcacttaagaagcaatatgataagtattatgttgtagaagttatgagcatatatttatggaaggaataaaaagtcaaccatcctagtggtacttggagattcgcaagtgggaataaaatttccagagacaaatttaaatttctggacatggagtccaaaagtgctatatctcacaactttgtcgtggaaagagcagagtgccaaacaggctctttgagagtggataaccacaaccatgacaccaaagatgaatgtgaaaagttcaaatacaattttcatgaaatgagaaagcaggggaaaatgtttcttaaattattatttttatgtgattttaaacatgtatatgcaatcaaagaataagttttagaagtatgcattcaaattgaattaaatacttgaaaaaatttttcattgggaaatagaaggagtgcttaatatttggggtcaccacgtgggcagaaaagagcaaacatagcaggtctgagactgcttcctccgaaggccggcttgcaaggttcgccctgggctggtatctggtaacttagatgtttggaggatttcccagttattttttattctctgataagaatagctcatgggccgggtgcagtggctcatgcttgtaatccaagcactttgggaggccgaggcaggcagatcacttgaggtcaggggttcgagaccagcctggccaacatggtgaaaccccgtctctactaaaaatacaaaaattagccaggtgtggtggcaggtgcctgtaatcccagctacttgggaggctgaggcaggagaatcacttgaacctgggagacggagattgcagtgagccaagatcatgccattgtactccagcctgggcaacaagagtgaaactcaatctcaaaaaaaaacaaataataataataataaaaaaactcatgatgcctaactgtgcaaacagcatggtttatgctgaccatctgcattcttttggggagtctagagtttttttgttaaaaacctttgacactgagtctctcatgagcttccctggtatagacaacatttcacatgtggtgtcattaattgctgctgggagaattaagtgcctattgtgtgtgtggtttggtggggagtgggggcaggacggccgacttttggaagcttgtgcctggtttcctttgcactttgctccatgagtctttggtgatcttgctctgtgtccttttgttgtaatgactcacagctgtgaatacgactatgtgctgaggcctatgagtccttccagtgaatcatcaaacctgggagtggtcttgagtgtcctcgacatactttatttttagccttgccttgtatttggagctatacagtatatgttgggggtgctgggggaggcttgcttctaagagaactgcctctatgggaaagtaacagcaatgaaatcaaccctacattgacttcaggagtccagcttcactaatttatctagggcttcctggttttccagttcccgtcatcaaagcactcagggcaccctacaaccgaaatttcccttcccaagggaattctcctgttaaaagtgtggcatttctgagaaaaagtaaggcatttctggaaaaaaaaatcccttcttcctgcatttgaagcttggagtgcccaataatttttctattccacctaaagaggtaagattttgtattagaaaaacatacgataatattagtgcaaaagacagcaatctagatgagagatctactgagatgaaaaataaataccgtgtaaaccatgtagttcatcaagtaatcaattttagttcttttaaatctggttttcccactattcttcattattttagtgtcagcacctgaaaatggaaaattcaatgtagtcatcagttgggaaaaatcaattcactagctcaccaataaaattactcttcttggccaggcatggtggcttacgcctgtaatcccagcagttttggaggctgagttgggcggatcacctgaggtcaggggttcgaggccagcctggccaacatggcaaaaccctgtctctactaaaaatacaaaaattatctgggcatggtggcacatgcctataatcccaactactctggagcctgagacaggagaatcacttgaacccaggagacagaggttgcagtgagctgagattatgccactgcactccagcctgggctacagagtgagactctgtctcaaaaaaaaaaaaaaaaaaaaaaaaaagctcatgatgctattactcttcttttggttttgatggacaaaggacagaaaagcaatcccctctaagtctttaaagatcatagctgattaatttcccaagaaactctgaacgtacctgcaaaaatgactaagccgtggcagaaatcggtgttcctaattacacagccacgtaacaaaattttatcagcatccaaaggaaaacttgtgtttctccaaaatagtgttcctgtaaacttatctagtctgttattgggttcttcacattcaataaaaccttttaaaaatataagattcacataattaatcacatacaaaagtctttctggttttaatcaataggaattgaaccaagcaactaaaatttaaagcaaagtaagacatgtttggtacaaaccatcaaatgtagccaatgtatcttctctttggaggtactggtctgtgatttcaagtgacatcttaaattttaaattggtttctctaaaggaatggggaaaaaatgaattaaatgaacaaatttttgagttcaaagtggaagttaatcatccaaagttacattagccatacctggacatgaagcctaaataattagctgtttctattttcaaactctgttcaccttggaacttcaggtttggaaaaggttatcccctgaagtcgagaaaatttctgaccttgggaaatgttggttcccttcactgtttgttgttgtgaaggttaggacagaggtacccacaaacatccttctcattaactttaactttaccatcagctaggactaccaaagtgctgtttgaaaatgtagtgtctaatatttaatcacattaaaatgattctataacacatatttgttacagaaattctgtttcgcctctgtcaaattcttttccagagtgaataactggatcacatgtttttgaaagacaattttatttggaaaaggaagtcttagctttactcccaactgccccaccatagtgcaaggtaaggtcgtgggtgggcacaagggcaggccggggcaggtgctctcaagggtgaggctgccgtctcacgactgaaggctttatataggattcacgaatactcaggaattttccctagggaagttcattctcaacctcaccattctgttctggcagggcatgttaggatcttatgtctttgtaaagctttagaatctctcatggaaataatagcagttttatagttgagaataaacagtcgggcgccgcggctcacgcatgtaatggcagcactttgggaggcagaggcaggcagatcacttgaggtcaggagtttgagaccaacctgacaacagaaagctctatcaggcaactgcccataatccaatttgggtatagcctcggggccttaaagagaatgcagtgtctttgtcagttaagcctttacaattaagaagtggttaattggtttttaaccaattagcctgtacaattaagaagtggttaattggctttaagtatttttttccgccaaaaaaaaaaaaaaagtgtgatagatttccaacagtcaattgcctgatctatgaagcaatgacagccctagttttcagtctcatgatttccgctctctgtaaagcagtgtatgcacatctggagcgtgaggcgcgaggagcagagggagcaatgtcccgactctaccacttactgtgtgaccttgggcgggctgctgcacctccctgggcctccgattcctcatgggtaatacagacgaataatattcgtctcacatggtcgtttagaggattaaatgagctaatatgtaaagtgccggcaacctcgtgagcactcaataaatgccttgaaaactggtcagaaaactggtcaaaaacagaacttcattctcttttaaatgatagcatagtaaccaaaaccaacacaaggagaattcaaaattgcctcctggggccagctgctgtggctcacccctgtaatcccagcaatttggcaggccaaggtgggcagatcacttgagatcaggagttcgagaccagcctggctaacatggtgaaaccccatctctactaaaaatgcaaaaattagctgggtgtgggggctggagcctgtaatctcagttactcaagaggctgaggcaggagaattgtttgaacccagggggtgtggaggttgcagtgagctgagatagcaccactacactccagcctgggcgacagagtgagactctgtctcaaaaataaataaataaattgcctattggtaaagactttaaaaatctgttcctttctctgacacagataataacctcgatattattcatatctgtctggacgctgctcagcagttgataaagggctcagacacatatgctcctgtctgatccttttaccttccctgagaggtggagaaacgcaggtagtaagagctccacttcacagaggcgcaaaggtgagatcagtagggacagcagcaggtggcagaggcaaggccagatatcaagccgtctggtccacaatgccccgatttcagtggaatgaatgtgccttcaaaggccagctttaaatcaggcccatcgagacacacttacccatccagttctgctgtttccacatagcagaggctgttaggctcagagctagacagcaggagaatgtcagcctgtccaaaacaaaacacacaaataacaccgagaccctgagggaaaagccgagcacaggggctgggggagaacaaggaacaagagaagcagaatttgttcacttactggaacaaaatcattttttttcagacgaatgacgtctccaacttgaatttctttccacttagcaactttgaacctaaggattaaaaataatgaggatttattgacattttaagttacaggcaagggaattactattctttctggatgttatagattctggaaaatatgcaagtcacagagaaaatgctaaaattttgctctttaatggatgtaaacatattaaaggggggcatgaaaattgtattgacctctgaaggaagcaatgatgaatgactttgatacattcttttcatctaggtcatgtaaggaagagtttatgggggccacttatgtgcgtggcagggaaatacttgccacccccttttgtttttgcttatgtccaacttgcctccctgctgtgttccttctcagtgacccatcacttgctccatgctggtcccaggacagaagcacctacattatggcacccacctgggcctcccagagtcttcgtggggcttcagagcttgcctactctctgctgtttaaattatctttattatttatttattaattttttttttcattgagacagagtcttgctctgttgcccaggctggagtgcagtggcacgatctcagctcactgcaacttctgcctcctggggttcaagagatcctcctgcctcagcctcccgagtagctgggactacaggcacgtgccttcacgcctgactaattttttagagatgagtttttaccatattggccaggctggtctcgaactcctgacctcaggtgatccacccacctcggcctcccaaagtgctgggattataggcatgagccacctcacctggccggttaacttcttaattgtaaaggcttaactgacaaagacactgtattccctttaaggccctgaggctacactcaaattggattatggtcagttgtctgatggagctttgtgttgtcaccacaacttgtgtttacacagccccttcagcctccctagggcatcattttcagggctttgctcacgtcttgacatctttccccacattccctcgctaaagtgaattttcccttccctgtactgtcagagcattttgtttttatcttttttattctgatatggattttattagaatgatgtgtgtaggtgtctcatcttctgtcttgaactataaatttctcaaggatactgtcctgcctccaacatgcagaaagtactccataagtgtttgttaaattaacgtagtcaactgtgacgaaagcaccaactcagggatcagtaatgagttgttttttgagcaggaggcttcaggcagaactgcaaattcaagtgctaaaaatagtaactaaggcctcattccaagactttttatgtgtcaacactgaggaaagtaacctgacttacagccgtacttccactctaatgcaaatatagactataccaagctataaatatgtttagatggctttttttcctttgcaaataagaaaattatgttccaaagttacctttcaagtgtcaaaagacaaaatcacaacaatttaaagatcttaattggctttatttacaattctaggattaggaaacacttcattcagtaaaatagaataagtgtcccaatgagcctagcagaggaggttgttgttgttaagacaggagtctcggccgggcccggtggctcacgcctgtaatcccagcactttgggaggccgaggtgagtggatcatgaggtcaggagattaagaccacggtgaaaccccatctctactaaaaatacaaaaaattagccaggtgcagtggcgggcgcctgtagtcccagctactcgggaagctgaggcaggatgctgtgaacccgggaggcggagcttgcagtgagcggagatcgcgccactgcactccagcctgggcgacagagcgagactccgtctcaaaaaaataaaaaaaaagacaggagtctcactaagttttccaggctggcctcgaactcctggcctcaagtgatcctcctgcctcggcctcccaaagtgctgagattacaggcgtgagccaccgtgcctggccaacccatatgtttagcctgtaccatacctacctacactggtaaagaggagctctgggttgccttgaatttggaagtctagggtgcatgtctggcagggccatggcctgagcagcccctgcagtggggtcacacctataggaacttgagcattagcagggtagagcacagggggcctcctcagaggaaactggaacatcggatagaagaatctaacagaattgcctccaatatttcagtattcagaattgccttccagtagccctgctaagaaggtgctggcctatccatttgtcatttcggacttacatgcaaatttctattttaaaatttcagaaatactgaaatgtaaaacatctacaatttcgtcaattgaaagataagccaaattttttttttaatgctggagttaagaattgtatactaaattcattaggggaactggggcataaacatatatttaaaaagtattttaaatctccaagtcatttttggccataaatgaatggcagataaacacatagtgattagacgactgcctccagtgaaattaagtttattatttatagcaggttcattacgtccactgggtatatcatttgtatatgtgaaaatctttaaaacaatattatagtttaaaacttttaaaagtgttgatatgttaaaaattttaatgaatatttcctatggaatttagtactcaaaatagtcatctttttatctatttttatcactatccttattagatttattacaacaggggtacatactcattaaaaagataatttaaggccaggcatggtggcttacacctgtaatcccaacactttgggagatcaaggaggataacttgaggtcaggagtttgagaccagcctggccaacatggtgaaaccccatctctactaaaagtacaaaattagctgagcatggtggtgcacgcctgtaatcccatctactcggaggctgaggcaggaaaattgcttgaacctgggaggtggaagttgcagtgagccgagataacgctactgcactccagcctgggcgacagagcgagactctatctcgaaaaaaataaacagttaatgtactaatagccttctacattgtaataattatctctgaatgtgtttctaggcagagttatgcattacatccttgaaactcagttactaattagacacagtacctgccatccttaatgacttcacacgtcctattgttgatttccttatccattttatggcgagccttgagaaggaagatggggaaatgctgttttaaacatctcaatagagaaggaaggcacgagaacttaaagtcaactcaaagcaatgagtagaacgttgtatgagaaatcctcaccacatcgtccaccaggtctttgattgcagtgacgcccagcaccacaagcaggggcactagtgtggtgtaccaagccagggtagagatttgaggaactgcctaaaagaataaaagggcttatgtgtgtgtccatgaaggcatatcaagcttacaggtaacttattgctaattctaagcttgctaattccaagtctcatcaccgtcatcacataagtctacatcctgcagagtatataggaaaggctcttcaagcatttggacaacctccttctagtggttctctctagcttctggatacctggaacagagcctagagggcagtggctcctgaaattatctcattgcaaacttaactggacaccaaggaagttttgtattatgatacctaaaaaagagttgctctaaatcttttgtgaaaatcatatttaactgggggtgagggggtaggagtggcaagggagaagtctcgtcttaactttttttttctttttttttttttgagacagagtctccctctgtcacccaggctggagtgcagtggcacaattttggctcaatgcaacctccgcctcccaggctcaagcgattctcctgcttcagcctcctgagtagctgggattacaggtgtgtgccaccacccccggctaatttttttgtatttttagtagagatgggttttcaccatgttggccaggctggtctcgaactcctgacctcaggcaatcctcctgcctcagcctcccaaagtgccgggattacaggtgtgagccaccgtgcctggccaaagtcatcttaacttttaaggaatgcatgcatagtaggttctatactgcaggtttctcagtcagtggtttctgaggatcccatgctgaaggcaatgatggcaagaggtactagctgcctctgaaagtgagggattagggagagcatctctgagggcattagaagaaagtgcttccttcatgatcatcactattggcctatccaagaaagtgagctggccttcctccatcaagacagcctctaagtttgaacaaagattgggatgcaagtttaataaagttatttcataaccatcctcctgatcactgggctgtataatgtagtggttaaaatgacaggctttggagtcaactcctagatccaagtcttggtcagctctatcatttatggcttatgggactttgagcaagttactttagcttactaggcctcagcttttctctgcaaaatggaggtcatgccaggcctgaccttctagactagaagaattaagtgtagtgacaacacaagttaagaagctgcctacggctattactgttaccctaatttggattgctgaccttaagagaagataactgcgccaggcacggtagctcatgcttgtaatcccaacactttgggaggccgaggtgggcggatcacctgaggttggaagttcgagaccagcctgaccaacatagagaaacgccgtctctactaaaaatacaaaattagccaggtgtggtggcgcatgcctgtaatcccagctactcaggaggctgaggcaggagaatagcttgaacctgggaggcagaggttttggtgagctgagatcacgccattgcactccagccttgataacaggagcgaaactccatctcaaaaaaaaaaaaaaaagagagagagaagataactggggtgcagttagaagacaaaaagatccttcttcccacatcacagtgaatatgtgaaactcctcttccctgctagaaggaagtaagggaaaatggtctacttcctacagagcagcaccttggagtttgcagtgctaacctctacacacacctttctaagcatctcctttgataacagggccatcctttactatctgacttgaaggtcttacagtttcctaaatcattgcctatccatttctccttaccatcgtctcttctttttctctcctctccacgcatcctccatccccacctagacacacattctaccccattttcataaaaccttaaagggtcaatcccagcaggtataacttttccaaatccaatgcttgccgtaaagaatctgataaagtgccgggcgcagtggctcatgcttgtaatcccagcacttggggaggctgaggcgggtggatcacctgaattcaggagtttgagaccagcctggtcaacatggtgaaaccctgtctctactaaaaatacaaaaattagctgggcgtggtggctggcaactgtgatcccagctactcagggggctgaggcaggagaatcgcttgaacccaagagaaggaggaggaggttgcagtgagccaagatggtgccactgcactccagcctggacgacaagagcgaaacacggtctcaaaaaaaaaaaaaaaaagaatctgaaaaaaccaggtggatattctgagcttaagctatgtaatccgcacggcagacactaaaggttgattctggcgctaactagtgtgtgtagagttccctcggttacagcaacagttcttgcacagctaaactcatgctctctggataactggatgctttgccacaattaggaaaaaaaatttttaagtaggccttttaaaatgtaaaaacagttcacaaaaataacttactgaaatttatgaccaaaattttaataaaaaatcaatgatctttttgggggggaaattcagcatctaactacaatgataaaagacaagcacaaaatagctttaattttaaggtgcaaataattttacaaagtaaggattttattttatttttttttaagatggagtttagctcttgttgtccaagctggagtgcaatggtgtgatctcggctcactgcaacctccgcctcctgggttcaagcgattctcttgcctcagtctcccgagtagctgggattataggcatgcaccatcacgcctggctaattttttgtatttttagtagaaacggggtttaaccatgttagccagggtggtctggaactcctcacccgaggtgatccacccgcctcggcctcccaaagtgctgggattataggcgtgggccactgagcctggctggattttagttttattcacttcagggataccaattttaacacccatatcagtataacatgaaattttttaaaatacagaattagaataatatttccatttgctccctttccctgttcatataacactgattgagctggttctgtgtatgaggcactgttcctttatgtacagaaccctgatgctaatataaaacactttcaagattattcacattatatgtgtctacagcttaaatgttatcgagtcactataattcaaacagatttaagatagcaaagggcattacctgtaagataagaagagccaggaaatataaattggctgctctcttaaactgctcaaacagattcattggtataaaggtaaatgcgttgtacttgtatgttttaattgcattattctgttggaaaaaataagagtcattctaaatgatgctgtatttatcacaatgtatacacatctgcaaaagtcacaagtcccacagcttacagtgacaaaggaacatcatctgtcagaaagatattgaggattttgtctgggtgcggtggcttatgcctgcaatcccagcgctttgggagaccgaggtgggtggatcacctgagcctaggagtttgagaccagcctagccaacatggtgaaaccccacctctactaaaaatacaaaaattagccaggcgtggtggcctgcacctgtaatcccagatacttgggaggctgaggcaggagaatcgcttgaaccagggaggcagaagttgcagatcgccccactgcactccagcctgagtgacagagtgagactctgccttaaaaaagaaaagaagaaagaaagatactgatatttcttttaagcttttaattctagccaagcagccaagcctcaaaatgactacttggagtcttatgacagaggcagtaacaagaaacagacatcagactgtgaccaaataaatcctgctgtcagattccttgacccattagagactgttagaaaacagggtaaaggtagacaacaacatggccaaagccaggaaaagtgaggcttttatttaagtgaggagacagagcctactatgtaagaaagagcaaaaggtactgtagtgggttgcattgtgtcctgcaaaagatatgttcaggtcttaacactaatatctatgaatgggatcttatttggaaataggatcttcgcagagataatcaagatgaagtcatacgtgattaggacaggctctaatttaatgaggtgcttattcggactggggtccctataagaggaaagttgcacacagacacacacaggaagagtgccccttgaagatggaagcagagattggggtgacttcatctgtaagccaaggaactccaaggattgccagtggccaccagaagccaggggagaggcagggaacagattctcctgcagaggctccagaaggagccaaccctgccaacaccaagatttcagacttctgatccctgcatcaggagagagtaaacttctgttgttttaagccatccagttgtggtactctgctatggaagcccttggcattaaaacacacatcttacaacatttaagcccacacttaatatttattattattattattattgagacagagtctcactcctgtcacccaagctggagtgcaatggcacaatttcagctcactgaaacctctgcctcctgggctcaagcgattctcttggctcagcctcccaagtagctgagactgtgggcacatgccaccactccaggctaatttttgtatttcgcatttaatctttaagcattctttatcacattccaaaggtaataagcatttttgagtcaaaaatatgtttaaaatctctaaatccattccaggcagagaaggggaagataagttcttaagagattcctttcaaactcattactttcaaacaggaggcttctgtgccatcattgtatattctttcataaaacatttctaagagagcttaaaatttaaaaaagagagagaaaatttcaatctacataattctgttttgtttcaagtcacccgctacccaccccaaaggtaaacatcaataaaaatgacattctatagaaacaatgatgattatcagtagccccaggcaggtggttacgtggaaggcaggtgtagcatgaaggtagtaagcatgccagctactggaaaaaactgcattttaatgaaaacaattcagaaagttaacaactcaccgcatatttactctccttaatacacaagaattttgtgttcataaagtgaggttgttcgtggtacttgcgatcgtttgctttgacttgccatgtacattctttaaaaaaaagggagaaaagttcgtaagtagcaaattaacatgttgttatgagttgaattgtgtcttccccagattcaaatgttgaagtcctaaacctccatccctcagaatgtgaccttatttggaaactgctcattgcagatgtaatcaaattaaagtgaagtcattagagaggaccctaattcaacatgactgatacctttacaaaaagggaaatttggacacagagatagatggaagacgatgcgaagtcacagggagaaaatggccatctgcaagccaaggagagaagcctagaacagatctctcccttgtagctctcagaaggaatcgatcctgctgacatcttgatgcctcgaggaaggcataagcatgctgctgctatgaaagctggaggcaagcatgctataaatcaggaagaaaatgaggaagcaggccgggcgcggtggctcacgcctgtaatcccagcactttgggaggccaaggcgggtgaatcacgaggtcaggagttcaagaccagcctggccaaggtggtgaaaccccgtctctactaaaaatagccaggtgcagtggcgggcacctgtaatcccagcttctcaggaggctgaggcaggaaaattgtttgaacccgggaggtggaggttgcagtgagctgagattgcgccactgcactctagcctgggcgacagagcaagactccatctcaaaaaaacaaacagaaaagaaaagaaaagagaatgaggaagcacctctttggcaccaagttctccatgaacatgcatgctggatgaagctcccttgagtgacgcacataatggagagaactaggtgttgatgaatccccaccaaattggcagagaagagaaattaacaatgagtgtggcacaactatttttggagatgggaatatattaaaagacacttgaaagtaaaaaattacaaaaatatcagtcttaacaactataataataaagattgtgtgatctcggctcactgcaacctctgcctcccgggttcaagtgattcttctgcctcagcctcctgagtagctgggattacaggtgcctgccaccacacccggctaatttttgtatttttagtagagacggggtttcaccatattggccagtctggtcttgaacttctgacctggtgatccaccagccttggcctcccaaagtcctgggattacaggcgtgagccactgtgcctggcaaaatgatgtattttctagactcctactccaaaggaaatatagacaatatggcaagagtaacaagtgtaggccgagcatggtggctcatgcctgtaatcctagcactttgggaggccgaggtggatggatcacttgaggtcaggagttcaaaaccagcctggccaacatggtgaaaccccgtctctactaaaaacacaaaaaagtaatggggcatggtggtgcatgcctgtaatcccagctactcaggaggctgaggcaggagaatctcttgaacctgggaggcagaggttgcagtgagccgagatagtgccactgcactccagcctgggcgacagacggaaactctgtctcaaaaaaaaaaaaaaaaaaaaaaagtaacaagtgtagactattgaggaatgcaaataattaacctgattgcttttttaaagccacaatatcactattgaacatttttctcgcatcattttggctgcctttcatcgggtaatcataacagttgtgttattacaaatgaaaatgttcctggtatctttgtagctcaagtgcaatcttatcaaaagggaaaataaaaatggaaatataaagccactcataagcactgtaatcacataggcaatcagaacagctcattccactcaaaaaggcgttctcaaagtaggtagataagaccttacataaggtactcttgaatccattctatttggtggtaatttgcaaatgcatgtgcttttaatggtttactttagcacacagatgacttgtgacacatccccaccaccagggttctagaacactgttcagaaccactgttacgcatttcaggaaggctgagaagaaaaacagacaagatttctcaagaagacagaaaaggccaataagggatttttaaaaagtcaattttagaaataactcaagtggaaagaagaaactgccctgttaaggagctggacataatgatctttcccagtccacttctggtccatcccccttgtggctctataaatttgcttcataattaagccaccagctggtggtggctctgtctggtcccagcactataccctcatccctggccaattttgatttggatgattcagacagagagggtggcatcagacctcgagtaggtgcagtgaggggttaccagaaatgaccttgatctcttaattttacacttctgccaatactgtggggagcctggagaaagtaaccagtatgtctttgtctgcaattgaaccgcaaacacgtttttactcaattttagaaatctgactgcagtcaagtaatcaataaccctatttccagttaaagatccttgtttggcctaattcagacaaatcaggggacaaacaaattgatgtctactctttattcatctatgagtttaggctaattgcttgagctgtatttcaatgagataccatgaaaatatgaaaacagagctccatggacagacacacttgcagaagacagcaccttgcaaccctctcttggaagttcggtggatttgcttgtacattaaaggctgtgagaagtcctgtagtaaataaactgattttattttataagttaaatgtttaaaatgctttaatatttaaaatagcttttccaaaattaatataatcataggcactttttaaaaaatcacagaacacttattaacatcagttaagaagtgctgcactgatacacatgcctttaggaagggcagcaaaacagcacgtggaggaattgacctttttgagcaaatatttattttaagtgtctgcttggaacagagaactttactggacacttgaactacaaagataatttacagaaagagtaagcatcttgccccattttctttttttgtccttttttctttcttttttcattttttttttgtttgagacagtcttgttctgtcatccagggtggagtgcagtggtgcgatctcagctcactgcagcctctgcctcccaggttcaagcagttctcctatctcagcctcccgagtagctgggactacaggtgcacaccaccacgcccggctaatttttgtatttttagtagagacagggtttcaccatattgatcaggctgttctcaaactcctaacctcaggtggtccacctgcctcgacctcccaaagtgctgggattacaggcttgagtcaccatgcctggccactttttcttttcttttctttttttttttttttaagagacggagtctcactatgttgcccagtgcctaggctggcctcaaattcctgggctcaagtgatcctcctgcctcagccttcagagtagctgggattacaggcatgcaccacactgtgcctggctcatctcattttctagaatggatatattgacaaagaaaagagaagaaataagaaatgcaaaaaatgcaccttcaccatatggccctttagctaaaagctacaaagctaacaagggtgtgccatcagaactatccatgtacatgtacagagatgattttaacagctgccatgtgacatgtggcttaaagtcaccctgagtctactaaatggttgtgttgtcaatatatctaaatatggctacgtgctctccagagtgttcccatgatcaccacgtcctttgatcagtgccatctggaagagcagatgagtgcagccctcctctcatcctctctgtgctggctccgaacgcttgcttacagacccaccaacaaccaagaagctgcactggttggtacacactgcagcaaacaaggaaaacaagtagataaaaagtccaacatcaaaaagaaaaaaaaaccatagaaacaattgaagagagaatggctaaaggacatgaaaagacagttcatacaaagggaaattcaatgctgttctcgctgaggctggagtccaatgatgcgatctcagctcactgcaacttccgtctcctgggttcaagagattctcctgcctcactctcctgagtagctggggttacaggcgcccaccatcatgcccggctaatttttgtatttttagtagagaccgggtttcatcatgttggccagactggtcttgaactcctgacctcaggtgatctgcccacctcggcctcccaaagtgccgggataatgggcatgagccactgtacctggcctcaaatggctcttaaacctgtgagaagatatttgggttcctaaaagagaaatgcaattcttcactgagatagtagtttttatcctataatagcaaaacattggcacatggtaatgcttgggatgacattctaggttcaaaagagagcagagaaacagacactctgaggtagcctttatggagagtaatttggccagatctcaaaatttaacacacacatgcactgaccaaataatcacacttctaggaaatatcccccatgtacctactgcagggattttcaatgcagccctatttatcagaacgactagaaacaacccaaatgcctactgggaacagccagttaaacacgattacaatgatagcctatgcagtcagcaaaaaaagaatgaggtgaccccataaatatggtaggaattacctccaaattacactgttaagagacaaaagcagaagggtatctaccatcttgtgctttcagctgtgtgatgcatagaattcatacacaatatgaatgcatatatgtacacacacgtgcacatctgtttctgcatatgtgtatgggtatatgaggaagcaagtttgcaagcattctttgcgcatacaaacgtgtatctctctggaaggacatattttgagaaactggtaaccgtaatttctttttgtcatttttttaaaagacaaagtctcactgtggcacctgggctggagtgcagtggcatgctcatagctcactgcagcctctgaactcctgggctcaagtgatcctcccacctcaacttctggagtagctgagactaaagtgcacgccatcgtacctaatttttaaatttttttgtaaagatgaggtcttgctttgcagaccaggctggtcttgaactgctgcccacaagctatcctcctgccttggcctcccagagtgccgggattacaggtgtgagccaccgtgcccagaccagcagtattttttttggaaaggaaactgcatgactgagggacaggagaggcaggaaggaaaacttcattttcattctggacccttttctaattggatcatttacatgtattactgttttaaagcaatgtttgtgattcctctccttccctctattggcatatatatatatatatatatggcgaatatggagaggagcaaggtggccaaatagaagctcgcacgaattgtaattcccataggaacatcaaatttaacaactatctacaaacaaaaaagcacctttataaaaaccaaaaaatcaggcactcacagtacctggttttaactttatattgctgaaaaaggactgaagagggtaggaaaaatagtcttgaattgccaatgccacccctcccccagccccagcaccagatgtgtggcatggagagaaaatctgtacgcttgggagagggacagtgcagcgattgtgaggctttgcactgaactcagtgctgccctgttacagacagtagaaagcaaaagcaggctgaactcagctgatgccagaccatagagggagcatttagaccagccctagccagaggggaatctcctgtaccttggtcagaacttgaattctggcaaacctcgtcaccgagggccaaagtgccctggggctctaaataaaattgaaaggcagtgtaggccccatgaactacaactcttaggcaagtcctagtgctgagctggacttggagccagttgacttagcaggcacatgacctactgagacaccagccagagcagctagtggaatgcttgctcggcccctccccgccaacctcactgctccaaaagagacctcttccttctgcttgaggagatgagagggaggagtaaagagaactttgtcttgcatcttggataccagctcagccacagtaggatagggcaccaggcagggtcatgaggctgtttcaggccctagttcccagacaacatttctagacaatcctggatcagaagggagcctgctgccttgcagggcaaggacccagctctggcaggatccatcacctgctgatgaaagagcccttgagccctgaataaacagtagtgatacccagttaatatccaaggctgtgggccttaattgaggctaagatattctggctttagttgtgacccagcacattcccagctgtggtggccatggtgagagattccttccgcttgagaaaagcagaaggaaaattaaagggtgctttgtcttgctcttgatctttctctttctttctttctttctttctttctttctttctttctttccttccttccttccttccttccttccttccttccttccttccttctttctttctttctttctttctctttctttctttcttttttctttctctctctctctctttctttcttttcagagatagagtcttgctattttgcccaggctggagtgcaatggtgtcatctcagctcactgcaacctgtgcctcctgggttcaagcaattctcatgcctcagcctcctgagtagctgggattacaggcatgtaccaccatgcccagctaatttttaaaaattttttattttattttattttattttattttatttgagatggtttctcactctgtcacccaggatggagtgcagtggtgcgatctcagctcactgcaacctccacctaccgggttcaagcaattctcctgcctcagcctcccgagtagctgggattagaggtgtgtgccaccatgcttggctaattttgtatttttagtagagatggggttgcaccatgttggtcaggccagtcttgaactcctgacctcaagtgttccacccaccttgacctcccaacatgctgggattacaggagtgagccaccgcgcccggcctaattttttttatttttagtagagacagggtttcgccatgttggccaggctggtctctaactcctggcctcaagtgatctgcccgcctcagcctcccaaagtgctgggattacaggcatgagacactgcgcccagcctgccttgcacttgctaccaccttggccacagtggggtaaagcaacaaatagagacccctcttggggtccctgagtctaggccttaggttcttggatgacatctctggacttgctttttgccagaggggagctcactgccctgaagggtgactgaaaggatttaccacaagctgactgaagaggccataggcctttaccgaacatcagcagtaacctggcagcactcctcataggcctgtggtggtggtggacatggggagaggcccctgagcctgtggaaagggcagaatagtggaaaggactggctaatggtttgagtgccagctcagccacagtagaatagataggacaccaagcagatttctaaggttttggactccagtccatggctcccagatggcatctctggatctggctgcagcctgggggaactcactggcttgaagctagcctggctggcttcacaacagggcattgagggaacataggcagccagatcatggttacagtgggccatggcgagacccagtgtggtgccagcttcatgtctgacccagtacattctcagtggtgatggccatattggtgcttgtatctccacccccctagctctgggtggcccagaacagagggagagagagaaggagaaagggagaggagggaggggggaagggggagagagaaagagcaaaaaaagagagagagagagattgattctgtttgggagaaagtaagcaacaagaacaagagtgtgggcttgataatccagataattcttccagatagtctgcaagaaatgcagcgttattgagcttgggatgccccctaatgcagatatgggttcaatcataatatccaagttcttttgaatacctggaaatccttcccaagaaggatgggtataaacaagcccagactgtgagagctacaataaatatctaactcttcaatgcccagacattgatgaacatccacaagcatcaagaacatccaggaaaacatgacttcaccaaacaaactaaataagacaccaggggccaaacctgcagaaacaaaactatatgacctttcagacagaaaattcaaaattgccattttgaggaaactcaaagaaattcaagatagcacagagaagacattcagaactctatcagataaacttaacaaagaggaaactcaaagaaattcaagacaacacagaaaaagtttagaattctatcagataaatgtaacagagattgaaataattaaaaagagtcaagctgaaattccggagttgaaaaatgcaaccgacatactgaagaatgcatcagagacttttaataccaggattgaataagtggaacaaagaattagtgagctggaaggtaagctattggaaaatatggtcagaggagacagaagaaaaaagaataaaaaagaaagaagtacacctacaagatctagaaaatagacttaaaaaagcaaatctaagagttattggcattaaagtggaggtagagaaagagacaggggtagaaagtttattcaaaggataataacagagaacttcccaaacctagaggaagatatcaatatccaagaacaagaaggttgtagaacaccaagcagattaacccaaagaagactacctcaggcatttagtaatcaaattcctaaaagtcaaggataaaaggaaggatcctaaaagcagcaaaagaaaagaaacaaataaaatacaatggcactccaatacgtctggcagcagacttttcagtggaaaccttataggccaggagagagtggcatgacatatttaaagtgctgaaggaaaatatattcaagcataaaggagaaatgaagaccttcccagacaaacaaaagctgagggatttcatcaacactagacctgtcctacaggaaatgctaaacagagtacattaatcagaaagtaaacgatgttagtgagcaataagaaatcacctgaaggcacaaaactcactggtaacagttaagtatacagaaaaacccagaatagtataacactgtgactgtgacatgtaaactactcttcagtaaaatgactaaaagattaactgataaaaaatagtgactagaacaacttttcaagacatagtacaataagatataaatagaaacaataaaaagttaaaaagcagagggaggaagttaaagtgtagagtttattagttttcttttagcttaaaataatgagttattagacagtacttacaagcctcatggtaacctcaaatcaaaaaacatacaatggatatatacaaaataaaaagcaggaaattaaagcacaccacaagagaaaaccaccttcactaaaaggcagaagggaagggaggaaagaaggaagagaagaccacaaagccaccggaaaacataacaaaatggcaagagtaagtccttacttatcaatataacatcgaatgtaaatgggctaaactgtcaatcaaaagatatagagtggctgaatagatttaaaaaaaaaaaagacccagtgatctgttgcctacaacagacactccacctggactgaaaatgaagggattgaagaagatattccatgccaatggaaagcaaaaaagaacaggatacctatatttatatcagacaaaatagatttcaagacaaaactataagaagagacaaagtcactatataatgataaagaggtcagttcagcaagaggatataatagttttaaatatttatccaccttacactggagcacccagatatataaagcaaatattactagagctaaagagagtgatagaccccagtaaaataatagctggagacatcaacactacactttcagcactggacagatcttccagacagaaaatcaacaaagaaacatgggacttaatctgcactatagaccaaatagatatttataaaatatttcatacaacagctgtagaatacacattcttttcctcagcacgtggatcattctcaaagacagaacgtatattaagtcacagaacgagtcttaaaacattcaaataaattgaaataatatcaaacatctgactgaccacaatgagtaaaactagaaatcaataataagaggaattttggaaactatacaaaaacatggaaattaaacaatatgttcctaaatgaccagtgggtcaatgaagaaattaaacaggaaactgaaaaatttcttcaaacaaatgataatggaaacatgataaaccaaaacctgtgggacacagtgaaagcagtactaggagggaagtttatagctatacgtgcctacatcaaaaaataagaaaaacttcaaacaacctgatgatgcatctaaaagaactagagccaggtgcagtggctcacgcctgtaatcccaacactttgggaggccgaggtgggcagatcatgaggtcaggagatcgagaccatcctggctaacacactgaaaccccattgctactaaaaaaatacaaaaaacttaggtgggcacagtggcgggcacctgtagtcccagctgctggggaggctgaggcaggagaatggcatgaacccgggaggcggagcttgcagtaagccgagatcacaccactgcactccaacctgggtaacagagcaagactctgtctcaaaaaaaaaaaaaaaaaaaaaaaaaaaaaaaaaaaaaaaaagaactagaaaagcaagagcaaaccaaacccaaagttactagaagaaaagaaataataaagatcaaagcagagataaatgacattgaaacaaagaaaacaatacaaaagatcaatgaaacaaaaacggttttttgttttggtttggtttggtttggtttttttttggagacagagtctcactctgttgcccaggctggagtgcagtggtgcgatcttggctcactgcaacctccgcctcccaggttcaagcaattcttgtgcctcagtctcctgagtagctaggagtagccaggactataggcatgtgccaccacacctggctaatttttgtagttttagtagagacagggttccactgtgttggccaggctggtctcaaactcctgccctcaagtgatccacctacctcagcctcccaaagtgctgggattacaggtgtgagccactgtgcctggccaagaagttagtttcttgaaaagataaacaaaattgacaaacctttagctggactaactaaaaaaaaaaaaaaaaaaaaaaagcaaaaaaagagagacccaaataaataaaatcagagctgaaaaagaagacattacaactgttaccacagaaattcaaagatcattagtggctactatgagcaactatttgccaataaattggaaaatgtagaaaaaaatggataaattcctagatacataaaacctaccaagattgaatcataaagaaatccaaaacccaaacagatgaataacaagtaatgagatcaaagccataataaaaagtctctcagcaaagaaaatcccaggacccaatggcttcactactgaatactaccaagcatttaaagaagaactaataccaatcctactcaatctattctaaaataaacaggaggaaatacttccaaactcattctacaaggccagtattaccctgatgccaaaaccagacaaagacacatcaaaaaacaaaaacaaaaacaaaaagacctataggccaatatcattgatgaatgttgatgcaaaaatcctcaacaaaatactagaaaattgaattcaacaacacattaaaaagatcattcatcatgatcaagtgggatttatcccagaaatgcaaagattgttcaacatacacaaatcaattaatgtgatatgtcatgtcaacagaatgaagggcaaaaaccatatgatcatttcaattgatgctgaaaaagaatttgatacaattcaacatcacttcatgataaaaaaaatcctcaaaaaactgggtacagaacaacatacctcagtataataaaagccatatatgacagacccatagctagtatcaaactgaatggggaaaaactaaaagcctttcctcttagatctggaacatgtcaaggatgcctactttcaccagaagtcctagctagagcaatcggacaagagaaagaaataaacggcatccaaattggaaaggaataagtcaaattatccttgtttgcggatgatatgatctcatatttggaaaaacctaaagactccaccaaaaaactatcagaactggtaaacaaattctgtaaggttgcaagatacaaaatcaacatacagaaatcagtagcctttctgtatgccaacagcaaacaatctgaaaaagaaatcaagaaaataatcccattgggaggagccaagatggccgaataggaacagctccggtctacagctcccagcgtgagagacacagaagaccggtgatttctccatttccatctgaggtaccgggttcatctcactagggagtgccagacagtgggcgcaggccagtgggtgcgcgcactgtgcgcgagccgaagcaaggcgaggcattgcctcacctgggaagcgcaaggggtcagggagttccctttccgagtcaaagaaaggggtgacggacgcacctggaaaatcgggtcactcccacccgaatattgcgcttttcagaccggcttgaaaaacggcgcacctagagactatatcccacacctggctcggagggtcctacgcccacggaatctcactgattgctagcacagcagtctgagatcaaactgcaaggcggcagcgaggctgggggagaggtgcccgccattgcccaggcttgcttaggtaaacaaagcagccgggaagctcgaactgggtggagcccaccacagctcagaggcctgcctgccactgtaggctccacctctgggggcagggtacagacagcagtaacctctgcagacttaaatgtccctgtctgacagctttgaagagagcagtggttctcccagcacgcagctggagatctgagaaccaacagactgcctcttcaagtgggtccctgacccctgacccccgagcagcctaactgggaggcaccccccagcaggggcacactgacacctcacacggcagggtattccaacagacctgcagctgagggtcctgtctgttagaaggaaaactaacaaacagaaaggacatccacacagaaaacccatctgtacatcaccatcatcaaagaccaaaagtagataaaaccacaaagatggggaaaaaacagaacagaaaaactggaaactctaaaacgcagagcgtctctcctcctccaaaggaacgcagttcctcaccagcaacagaacaaagctggatggagaatgactttgacgagctgagagaagaaggcttcagacgatcaaattactctgagctacgggaggacattcaaaccaaaggcaaagaagttgaaaactttgaaaaaaatttagaagaatgtataactagaataaccaatacagagaagtgcttaaaggagctgatggagctgaaaaccaaggctcgagaactacgtgaagaatgcagaagcctcaggagccgatgcgatcaactggaagaaagggtatcagcaatggaagatgaaatgaatgaaatgaagcgagaagggaactttagagaaaaaagaataaaaagaaatgagcaaagcctccaagaaatatgggactatgtgaaaagaccaaatctacgtctgattggtgtacctgaaagtgatggggagaatggaaccaagttggaaaacactctgcaggatattatccaggagaacttccccaatctagcaaggcaggccaacgttcagattcaggaaatacagagaacgccacaaagatactcctcgagaagagcaactccaagacacataattgtcagattcaccaaagttgaaatgaaagaaaaaatgttaagggcacccagagagaaaggttgggttaccctcaaagggaagcccatcagactaacagcggatctctcggcagaaaccctacaagccagaagagagtgggggccagtattcaacattcttaaagaaaagaattttcaacccagaatttcatatccagccaaactaagcttcataagtgaaggagaaatcaaatactttacagacaagcaaatgctgagagattttgtcaccaccaggcctgccctaaaagagctcctgaaggaagcactaaacatggaaaggaacaaccggtaccagccgctgcaaaatcatgccaaaatgtaaagaccattgagactaggaagaaactgcatcaactaacgagcaaaatcaccagctaacatcataatgacaggatcaaattcacacataacaatattcactttaaatgtaaatggactaaattctccaattaaaagacacagactggcaaattggataaagagtcaagacccatcagtgtgctgtattcaggaaacccatctcacgtgcagagacacacacaggctcaaaataaaaggatggaggaagatctaccaagcaaatggaaaacaaaaaaaggcaggggttgcaatcctagtctctgataaaacagactttaaaccaacaaagatcaaaagagacaaagaaggccattacataatggtaaagggatcaattcgacaagaagagctaactctcctaaatatatatgcacccaatacaggagcacccagattcataaagcaaatcctgagtgacctacaaagagacttagactcccacacattaataatgggagactttaacaccccactgtcaacattagacagatcaacgagacagaaagtcaacaaggatacccaggaattgaactcagctctgcaccaagcggacctaatagacatctacagaactctccaccccaaatcaacagaatatacatttttttcagcaccacaccacacctattccaaaattgaccacatagttggaagtaaagctctcctcagcaaatgtaaaagaacagaaattataacaaactatctctcagaccacagtgcaatcaaactagaactcaggattaagaatctcactcaaagccgctcaactacgtggaaactgaacaacctgctcctgaatgactactgggtacataacgaaatgaaggcagaaataaagatgttctttgaaaccaacgagaacaaagacacaacataccagaatctctgggacgcattcaaagcagtgtgtagagggaaatttatagcactaaatgcccacaagagaaagcaggaaagatccaaaattgacaccctaacatcacaattaaaagaagtagaaaagcaagagcaaacacattcaaaagttagcagaaggcaagaaataactaaaatcagagcagaactgaaggaaatagagacacaaaaaacccttcaaaaaatcagtgaatccaggagctggttttttgaaaggatcaacaaaattgatagaccgctagcaagattaataaagaaaaaaagagagaagaatcaaatagacacaataaaaaatgataaaggggatatcaccaccgatcccacagaaatacaaactaccatcagagaatactacaaacacctctacgcaaataaactagaaaatctagaagaaatggataaattcctggacacatacactctcccaagactaaaccaggaagaagttgaatctctgaatagaccaataacaggatctgaaattgtggcaataatcaatagtttaccaaccaaaaagagtccaggaccagatggattcacagccgaattctaccagaggtacaaggaggaactggtaccattccttctgaaactattccaatcaatagaaaaagagggaatcctccctaactcattttatgaggccagcatcattctgataccaaagccgggcagagacacaaccaaaaaagagaattttagaccaatatccttgatgaacattgatgcaaaaatcctcaataaaatactggcaaaccgaatccagcaacacatcaaaaagcttatccaccatgatcaagtgggcttcatccctgggatgcaaggctggttcaatatacgcaaatcgataaatgtaatccagcatataaacagagccaaagacaaaaaccacatgattatctcaatagatgcagaaaaagcctttgacaaaattcaacaacccttcatgctaaaaactctcagtaaattaggtattgatgggacgtatttcaaaataataagagctatctatgacaaacccacagccaatatcatactgaatggggaaaaactggaagcattccctttgaaaactggcacaagtcagggatgccctctctcaccactcctattcaacatagtgttggaagttctggcccgggcaattaggcaggagaaggaaataaagggtattcagttaggaaaagaggaagtcaaattgtctctgtttgcagatgacatgattgtatatctagaaaaccccattgtctcagcccaaaatctccttaagctgataagcaacttcagcaaagtctcaggatacaaaatcaatgtacaaaaatcacaagcattcttatacaccaacaacagacaaacagagagccaaatcatgagtgaactcccattcacaattgcttcaaagagaataaaatacctaggaatccaacttacaagggatgtgaaggacctcttcaaggagaactacaaaccactgctcaaggaaataaaagaggatacaaacaaatggaagaacattccatgctcatgggtaggaagaatcaatatcgtgaaaatggccatactgcccaaggtaatttacagattcaatgccatccccatcaagctaccaatgactttcttcacagaattggaaaaaactactttaaagttcatatggaaccaaaaaagagcccggattgccaagtcaatcctaagccaaaagaacaaagctggaggcatcacactacctgacttcaaactatactacaaggctacagtaaccaaaacagcatggtactggtaccaaaacagaaatatagatcaatggaacagaacagagccctcagaaataatgccgcatacctagaactatctgacctttgacaaacctgagaaaaacaagcaatggggaaaggattccctatttaataaatggtgctgggaaaactggctagccatatgtaggaaactgaaactggatcccttccctacaccttatacaaaaatcaattcaagatggattaaagatttaaacgttagacctaaaaccataaaaaccctagaagaaaacctaggcattaccattcaggacataggcatgggcaaggacttcatgtccaaaacaccaaaagcaatggcaacaaaagacaaaattgacaaatgggatctaattaaactaaagagcttctgcacagcaaaagaaactaccatcagagtgaacaggcaacctacaaaatgggagaaaattttcgcaacctactcatctgacaaagggctaatatccagaatctacaatgaactcaaacaaatttacaagaaaaaaacaaacaaccccatcaaaaagtgggcgaaggacatgaacagacactaatcaaaagaagacatttatgcagccaaaaaacacatgaaaaaatgctcatcatcactggccatcagagaaatgcaaatcaaaaccactgtgagataccatctcacaccagttagaatggcaatcattaaaaagccaggaaacaacaggtgctggagaggatgtggagaaataggaacacttttacactgttggtgggactgtaaactagttcaaccattgtggaagtcagtgtggcgattcctcagggatctagaactagaaataccatttgacccagccatcccattactgggtatacacccaaatgactataaatcatgctgctataaagacacatgcacacgtatgtttattgcggcattattcacaatagcaaagacttggaaccaacccaaatgtccaacaatgatagactggattaagaaaatgtggcacatatacaccatggaatactatgcagccataaaaaaggatgagttcatgtcctttgtagggacatggatgaaattggaaatcatcattctcagtaaactatcgcaagaacaaaaaaccaaacaccgcatattctcactcataggtgggaattgaacaatgagatcacatggacacaggaaggggaatatcacactctggggactgtggtggggtggggggaggggggagggatagcattgggagatatacctaatgctagatgatgagttagtgggtgcagcgcaccagcatggcacatgtatacatatgtaactaacctgcacaatgtgcacatgtaccctaaaacttaaagtataataaaaaaaaaagaaaaaaaataatcccatttataatagctatgaataaaatagctaagaattaagtttaccaaagaagtaaaagatctctgcaatcaaaactataaattgattgcaatgatgcaagaaactaaagaggacaccagaaaaatggaatgatattccatgctcatggattggaatattgttaaaatgtccacactgcccaaagcaatctacagattcaatgcaatctctatgaaaataccaatgactgtcttcacagaaatagaaaaaaaatcctaaaatttgtatgggaaccacagaagacccagaaaagccacagctaatctaagccaaaagaacagaactgtaggaatcacactacctgacttcaaattatatgacagagctataataaccaaaacaacgtggtattggcataaaaacagacacacagatcaatggaacagaaaagagaactcagagataaattcatacatccttagtaaacttgttttcaacaaaggtgccaagaacatacattggggaaaggcagtctcttcaataaatgatgcaaggaaaaactgcatatttatatgtagatgaatgaaagtagaccccatctcttgtcatatgcaaaaattgaatcaaaatggattacagacttaaatctaagacctcaaactatgaaactactccaagaaaaccctggggaagtctgagcatggtggctcacgcctgtaattccagcactttgggaagccaaggtgggtggatcacaaggtcaagagatggagaccatcctggccaacatggtgaaaccctgtctctactaaaatacaaaaagttagccgagcatggtggtacatacctgtagtcccagctactcgggaggctgaggcaagggaattgcttgaactcaagaagttgaggttgcagtgagccaagattgtgccactgcacttcagcctggtgacagagcaagactctgcctcaaacaaaaacaaacaacaacaacaaaaaaaccacttgggaaactctccaggacactaaactgggcaaagatttcttgagtaatacttcacaagcacaggcaaccaaagcaaaaacggacaaatgagatcacaagttaaaaagcttctgtaaagcaaaggaaacaatcaacaaagtaaagagacaacagaatgggagaaaatattcaggccactgaattcattttaaatgatagattcttccccttgcctcatcccagaaccactctgtatcttcaggggctgggtccaggcacctagagagtttgtaaaaattccacaagaggttctgatgtacaggcaggactgagaacccccagttagtgcaaaggagagtgtcttcctatggtgacttctatcattaaaaatctacttctgaacttgggctgcaaagtagcaggaagaaaaccaccagctgagttaggtttccatgagcaagagattcttacccaaggttcaatcataaattacatgacttgaaagcaaattctctaaaatgagcatgttgcccaagatcttaaaaataaatagaataggccgggcacagtggttcatgcctgtaatcccagcactttgggaggccagggtgggcgaatcaccttaggtcaggagttcaagacaagcctggccaacatggcaaaattccgtccttactaaaaatacaaaaattagctgggcgtgatggcgggcgccggtaatcccagctactcgggaggctgaggcaggagaatcacttgaacccgggaggcggaggttgcagtgagctgagatcacgccacttcactccagcctgggcaacaagagcgagattctgtcaaataaataaataaacaaataaataaaaagaataaaataaaatgagatggcacagtatcaccacccttccccatcagtaatcactcagtgcaggaatacccctcaccctgcggctttacaagcatcaattactctggtgtttttaggctgtggaggtggatggtaatttacaaccgatcagagaaagaaagaaaataagtagccagagtagactcccatatgtggtatgtgccgaaaatggaaaattcatcttattaagtggaacagctccctcagcacttttcacagattccctaggatatcctacgattgatacgtttcaatgagccatctttatctgtgttttggttccaactaaatattaattcatagatgcgctaaagaccccacattcttaattccagattattttatgaagatatcactttaaggccgggtgtggtagctcacgcctataatcccagcactttgggaggctgaggctggtggatcacaagttcaggagatcgagaccatcctggccaacatggtgaaactctgtctctactaaaaatacaaaaattagccaggcgtggtagcatacgcctgtaatcccagctacttgggaggctgaggcaggagaatcgcttgaacccaggagcggggttgcagtgagccgatatcgcgcctctgctctccagtctgggcgacagagagagactccatctcaaaacaaaaacaaacaaacaaacaacaagaaaactccaaaaatacaaaaactagtgtttcccagaacacatgctgagaagtgtgttcatcaggaaacgacagagctcatcccatagcactgaaaacattcccgctcatttctgagaatctttgctgaatctttacacaaagggtaaagttactccactcgaacctgtgggcttatctttctccatggcacattctaacagcatgtttgtgcctgtccttccttctcacaaaacacaataaaggtccttctagtgaaaagtactctgaatgggtctctcaaagcacttgtttaacaggaaagcttagttgggctagaggatttcctttctttaaaaaaaaaagaaagcaactttctgtgctacaaccctcattaaagaaactagcgcagttcaggctgcttaggcagtgttttgctagaatgggtgctggtccctggtgttagtctggtggtacctcgcagggtgactcatgttctgatgtcttaaagaactgattctctgaaggaaattattcaggatgtgaaatgtcaagaaagacagatgatgattaaaaaaagaaagagaagtcagggtgacactgaccttaactgggaaattgcacaaatgagaatatagtgggaaaggaaagagggatgaagagggcaaagagaggaagggaggaaagaaggagagcagactggctgtgagggaggcagggcacatgggaaatgggaggaaagaggtctggcatttactgaacatcatctgtgtgcttgggaagggcgcagagaggtattagaataagaatttttgtaaaaagtcacaggcaaagtcatttgatatgggttttgagaagcgagaaccacccaaatcccctaggaatataaatcacccttggaaaacatgactaagattcaagactgagcattttttttttttttttgagatggagtctcactttgtcacccaggatggcgtgtagtggtgggatcttggttcactgcaacctccatttcccaggttcaagcgattctcctgcctcagcctcccgagtagctgggattataggtgtgcaccaccatgccgggctaatttttgtatttttaatagagatggggtttcactatgttggccaggctggtctcgaactcctgacctcaggtgattcaacttccttggcctcccaaagtgctgggattacaggcatgagtcaccacacccggccaagactgagctcttttaatgcccatataccgagggtagaaatctacaaaacgtatgacctgcaaactgaatgatcaggaaaggatcctaaccaccagaatgggcaggcagagttgtaaaaaaacaggggatgagagtttccacccactacatgcgtctctgacatttctgcaggcacccaatcccggtccctttgctgtgtctcggactacacatctgatggcgtgccaccaagcaccaagagcaaagttgaccctggaccccatggagccaattctcctgccaccccatcagatatctacatttggtagagattccaaaattgtgataggagactaagcagtgcaattagcggggaaaggaatgaggaagaagcatgttttattcactgtttgggcaatcaactagaacttccttgtaacttgtctggctgcttcagctttagctagttcaccaatatccagtctggacctgttatgacagaggccaccttcctgttcagattggtgggaattccattttctttctttctttttttttttttttttttttttttgagttggagtttcactcttgttgcccaggctggagtgcaatggcaccatctcagctcactgccacctctgcctgccgggttctagtgattctcctgcctcagcctcccaagtagctgggactacaggcacttgccaccacgcctggctaatttttgtatttttagtagagagggggtttcaccatgttggtctggctggtctcgaactcctgacctcaggtgatccacccacctcagtctcccaaagtgctgggattgcaggcatgagccactgtgcccggcaggaatttcactttaattttggtcaagtatcatgagtttagtaccttctgattcaaggcagaaggcacttaagctcaatcctcaacagcttgaaatcaaaaccagaaacccactctaagaggtaatccatctaaatgtttgctatggaaaggtagcggacacacaacatacaggagtcaatggcctccccacatttgggtgagatggggctcccggggtgcatgcactccccacactgagaatctccccacaggcagattctgtgaccagaacaggaagaatcattgcagaaacgggatttcatgcatatcacatcttctacaggttaaaattattagaaaaaaatagctcatccagatagcagaacccaagaaagagaaactagagggggggtttggcatgggggaaaaagaggcttctagaaagcctgcaagggcagaatggcagtaacagagacctcgggaaaaccagctaaaatccgaggcttctctgactaaggctgcagggaggcgtgtctggagcgctgaaaccagaacactatgatgatttctgtgaatgtgatgctaaggttgttcggctagaattttacggaacaccatggaggaaatattttcagcctgatatcaaatctggggtccagagagaaaagtctcagcttgctcatggagaagagctacaagagaagcccacatctgtttgccagggtgggagaaccagcaggagatgaaatagaaaagccacaaaagaaaaggcatcatggtaaaagcaagccatgttctactgccctcagtgatgtactgtctgcggtcacttacactcaacattggcagagaccacgtggtccacaaagcctaaaatgtttacttgctggccctttacagaaaaagtttgctggccttggtctagaccctgcctctgatgctggcctgaccctgggcagaccatatacatatatatatatacacacacacacacatacacaaggatggttatttatataactcataccgccaatttaacaatactaatagttaacatctaagactgattgatatgtatcctttaaaaatttctgggtgcagtaacatgcagattcttgcccgcataactccattttaagaatatatacactggctacgcatcgtagctcatgcctgtaattccaggagtttgagaggttgaggtgggcagatcccttgagctcaggagtttgagaccagcctgggcaacatagtgaaataccatctacacacacaaacacacacacaaatacaaaaattagttggacatactggtgcatgcctgtagtccagctactcaggaggctgaggtaggaggatcacttgagtccaggaggtcaaggctgcagtgagccgagttcacaccactggactccagctggggagacacagtgagaccctgcctcaaaatatatatatatatatatatatacacacacacactaacaaagaccttaatgtattttctctgcagaacttgtcagatatgctctcccagcccttcttactaaggacaatgggtacttgtccaagcccatccaccattctgtcagtcgcatcctaagaagagatcagagaagattccctcctagaccacgcaaaatagaccgatcatctttggcacgtgtggccatgacccacatgaggatttataagcgacctagtcaccgggacttcatgtggttaccttttctgaatggctcccggttctcctctgcttccctgttgactcggttttgttctggttcaacagcagacccctggtcatcaagttcatcttctgtttcatcatcactgtagggaaccacttcgtcattaggctgagaatcctcgtcaaatgtcgtttctgagtctctttctgtactcattctgctggcaaattggaactacctgcttaaaaggaaagagaaaccagagtgaattatgactcttgcccagtttttggttgaatactgcctgcatgctgctacaatgccccttttacagaacattgtctaacatgtaaatattctggaatagtacccccaaattcaacttgacatgaaaacaagaacaaaaccattcagtactgattaaatgcttgggtaagatttttttaaaaaatatggagctgcaaaccttttatttttaaacaagggtatatatatatatgtatgtgtgtatatatatgtatatatgtatatatatgtgtatatatatgtatatatgtgtatatatgtgtatatatgtatatatatgtatatatgtatatatgtgtatatatgtatatatgtgtatatatgtatatatgtgtatatatgtatatatatgtgtatatatgtatatatgtgtatatatgtatatatgtgtatatatgtgtatatatgtatatatatgtgtatatatatgtatatatatattcaaggcaatatttcaaattagggggtctcaatgaaataaatttagtgggtaacaatcaacattaaaataaaatgaaacaggctataaaatatcagattacagcacatataataagtactgcttgataaaatagttgtatacattcacacgtttatttgcattgtgggtgttagtggagttgaatttcttttttttctttttttgagaatagagtctccctctgtcacccaggctggagtgcaatggcatgatctcggctcactgtcacctccgcctcctgtgttcaagtgattctcctgcctcaacctcccaagtagctgggattacaggcacacaccaccacgcccggctaatttttgtatttttagtagagacggggtttcactgtgttagccaggatggtctcgaactcctgacctcaagtcatccacccgcctcggcttcccaaagtgctgggattacaggcgtgagccaccgcgcccggccggagttgaatttcttactgtggattgctggcaaagttgacaaaccactgctctaagatatctggtttctgctaacactaacgtcctgagcctttgttctgatacaacatttttaatataaccttagatcttccaagtttactgacttcccaggaacactccctagcctttctatcttcctaactaccactgcccactctgtatctggaatttgtgtttgagcatctaccgcataagatgaccccatacaagtgagaagaacaaccttagttagatttattttaggaaaatatttacacaaatacctcaggttacagacacacagcctggcatttacataagcatcacagtgccgtgtagtcagtattgttaatgacagcagctcgcatttattttgtgttaactgcatgccaagccttgcactaagcactttatagacatgtgctctttgaaacttcccacaccaccatggtgaataacagtattattgttattcctacccagcagaggagaaaaatcaaaacactggagtgctaaataatttgcacaatgattattaaaaatttaaggcagccacgcacggtggttcacacctgtaatcccagcactttgggaggccgaggtgggcggatcacgaggtcaggagatcgagaccatcctggctaacacagtgaaaccccgtttctactaaaaatataaaaaattagccagacgtggtagcgggcacctgtagtcccagctgctcgggaggctgaggcaggagaatggcgtgaacccaggaggcggagcttgcagtgagccgagattgcgccactgcactccagcctgggcgacagagcgagactccatctcaaaaaaaaaaaaaaaaaaaaatgtaaggcaaaaacaactgcttcacaaggagaggtctatgctctatttttgtactatggtttatgatatattttgagtgaaaattgcctcaagtagaactatgtagctgattgcaagttttgcaccaaatcttagatctctaaaataatttttacattcacaaatggagaaattttcaaatatttatatgaggatttttaccaagtattatgtaaaacagtaaaagccaaaagcaagctgggttacaattgtcgactgtgtaaataaattgtggcatctcatattataggataatgtgcaacaatctaggtgatccgaagagtatttgatgacattgcattaatgaccttaagttaataggtaagttataaagccatatgtatagaatacacccagttattcacacacacacttgttcattttccaaaatttcaacaattgacatacattattttattattattatcttttgagacagagtatcgctctgtcacccaggctagagtgcagtggtgcaatctcggctcactgcaacctctgcctcccaggttcaagcaattctcctgcctcagcctcctgagtagctgggattacaggcatgtaccaccatgtctggctaatttttgtatttttagtagagatggggtttcaccatgttggccaggctgggacatacattattttaagtgagatgatgcatgcaaaatgctcaactcagtacctagcctgcaataagtattcaatgaacattaactgttaatttttcatatacttcttggcgatttgtatgtttccttttgaaaaatgtctattcatgtcctttgcccactttttaatggtattattattattttaaaatattgctggcattcattattacaaagaacaacttagattctactgcatgatgctgtactgtggcacagttctaaagagccctatagtcatggatgcaaagttcctagcactactggtcctcagcacctcaggccattatcttatggcttcacagaatattcattccccaaatccatagtctttacctctggccttagcttttcagtagcaagcacaagcattcctggtgagagacagggctagctggatttcctaggccgactatgaatccctaagtctagctgggaaggtgactgcatccacctttaaacaggaggcttgcaactgagctcacacctgaccaatcagagagctcactaaatgctaattaggcaaaaacaggaggtaaagaaatagccaatcatctattgcctgatgaactcatctattgcctgatgagggacaaggatcgggatataaacccaggcattggagccagcaagggcaaccccctttgggtcccctccttgtatgggagctctgttttcactctatttcactctattaaatcttgcagctgcacccttctggttaccgctagaactgagctttcgctcgccgtccaccactgctgttttgctgccgtcgcagacccgccgctgacttccatccctccaatccagcagggcgcccgctgtgctcctgatccagggaagcacccgttgccactcctgatcgcgctaaaggcttgccattgttcctgcatggctaagtgcctggtttcgtcctaatcaagctgaacactagtcactgggttccacggttctcttccgtgacccacgacttctaatagagctataacactcaccgcacggcccaagattccattccttcgaatccgtgaggccaagaaccccaggtcagagaacacgaggcttgccaccatcttggaagtggcctgccgccattttggaagtggcccaccaccatcttgggagctctcggagcaaggacccctggtaacactggcagtacttatactttcattggttatacttatacttccccggttatatttatactttcctggcagtacgtatactttcatggtttatactattttaaaattattttttattaaatggagccaaattttttaaaagtcatcttttccactaaattgacatcaccatgttaaatctaaatttccctactaagtctttattttattttactttaagttctaggatacatgtgcagaacatgcaggtttgttacataggtatacatgtgccatggtggtttgctgcacccatcaacccgtcatctaggttttaagccctgcatgcattaggtatttgtcctaatactctcccattccttgccccccccacccccacccccaacaggccccagtgtgtgatgttcccctccctgtgttcatgtgttctcattgttcagctcctgtttatgagtgagaacatgtggtgtttagttttctgttcctgtgttagtttgctgagaaagatggcttccagcttcatccatgtccatggaaagaccacgatctcattcttttttatggctgcagggattatttgtttttgagttgtttgagttccttgtatatttctggatactagtccttagttagatgaatggtttgcaaatattttctcctattcagcaggaaacactgttgattgcttcccttgctgagtagaagctttttagtttaatatagtcctatttgtctatttttgttgttgttgttgcctgtgcttttgaggtcttagccataaaatctttgcctagaccaatgtcctaaaacattttccctatgttttcttctagtataaagttttattagttttttttttttttttttttttgagaggagggtttcactctgtcactcaggctagggtgtagtaggacgatcatagctcattgcagcattgaactcttgggctcaaggaatcttcctacctcagcatcccaagtaactgggactaccagtgcatgccaccatgcctattttttttttttttttgtagcgatgggatctcactgcattgtccagactggtcttgaattcctgggtcaagtgatcctccaggcttgggctcccaaagtgctaggattataggtgtggtcccatttaagtctttaatccatcttgagttgacttttgtgtatggtgagagacaggggcccagtttcattctttagcatgtggggatttatttctgggttccctattctgttccattggtttatgtgtctgtttttagcccatattatgttttggttactacagccttgttatatatatatgtatcaaggtgactgtgaaggtactatatggaaacattttttattgttgtaaaatatatgtacataaaatttaccattttagccattttgttttgtttttctcattgcagcctcctgggctcaagcaattctcccacctcagcctcctgagtagttgagactataggtataagccactacatccgactaatttttgtgtttttagaagagacagggttttgccatattgcctaggctggtctcaaacttctgggctcaagtaatctacctgcctcagcctcccaaagtgctgggattacaagcatgagccaccacgccaggctttgtttctccctacttttatttttttttaatttcttaaagctgtaccattggagaattttaactttttgtttgttggttggttttctttctcttattattgttattatttttttgcatctcagatgacacaaaccattgtttgtttcctgagacatggtttcactctgccaccgaggctgcagtgcagtggcatgatcctagctcactacactctcaaatctgagggctccagcaatcctcctaccctgctccccagcctccctagtaactaggactagaagcacaagccaccatgcctggctttttttttctttcttttctttcttttttttttaaaagagataggctctccctatgttcctcaggctggtctcaaactccgggccccaagcaatcctcccacctcagcttccttttagcccttttcaagtgtagggttctgtggcattaagtgcatttatacaaacattttgtaagttatccttttcatcattgcttccaaactgccaggcatctggatattaagactgtctccagccctttgaggttgagagaggaagcaagcacggaggaatggatttgacaacccacatgtccgtgactcaaagcaagcaaggccttgcacaaccaactcgccacccacacaatctgcacagtctcagtgagaaagcaggagcagggagctctccgctgagagtgaagaaatgtcctcaactcaacttctctgcagtgtgcatgtgtgtgaaacgcagacacacacgggaggaatttggctctgtcattttagtgtaccaaagaaaaaaaaacagggagaaatcacttgtttgaagccctaaatgacataaggaagattttcccagatctaaataatgatccctaaggtcaggtgctgtgtatggtatggatttggaaacttcataatgtctctgaccaccactccaggacactgcagacaggtgtgcatttactcagcatccagtaaacacctgcaaggtgcagagtactacactaggcacagggaacagagctactgactgactgccagagtttcgaagaatacagataagtcaactattaaagctaggaaacagaccggatgcggtggctcacgcctgtaatcccagcactttggaagaccgaggcgggtggatcaactgaggtcaagagttcaagaccagcctgccaacatggtgaaactccgtccctattaataatacaaaaaaattagctgggcatggtggcacatgcctgtaatcccagctattcgggaggctgaggcaggagaattgcttgaacccaggaggctgcagtgagctgagatcgcgccattgcactccagcctgggcaacaagagcgaaactctgcctccaataaataaataaataaaataaaataaaataaagccataaaacagtaaagccagtcgtttttgcctcaaatactcctccaattcatcacctcctctctatctccatggccaccatcatctctccctggaaatgctgcgagatccctctaactagactttccacaattaacttccacatgaccaccaaaggcatgccattctcctgcttacacccttcctgggtgttatggattgaattatggcccccgaagtcatatgttgaagccataacacccctcaatgtgactacatggagagaggtcctttaaggaggtagttaaggttaaataaggtcatcagatggggccctaatccaataggacttgtgtattttatttttattattttttagactcagtttcgctctgttgcccaggctagagtgcagtggcatgatctcagctcactgcaacctccacctccctggttcaagcgattctcctgcctcagcctctcaagtagctgggattacaggtgcccgccatgacactcagctaatttttttgtattttcagtagagacagggtttctccttgttggtcaggctggtctcgaacttctgacctcaggtgatccgctcaccttggcctcccaaagtgctaggattacaggcatgagccaccatgcctggccaatttcttattcgttaggtctcaacttcagtgtcctcttccactcatggtattgagcaggattctgccctcctcttcctgctaccactggcccccttgagcacctacatttctgtttccttcctaacacttatcatgatttgtaaacatgcatttgctttcatttatctgcctttcccaccagaccataaactctacaagaacagattggtctgtgaatactcagtgcctactacacagttgacactgaaagatctggggaaagagcaaatcaactttcaataaagtcttcaagggctcagagagttgtcttacaccaaagttctttaccacctttacacaggtcacacctaccacatggtaacagattcacaaagtcattggactagggatgaaagattgagggcaatgatgggagaaaacagcaacagttaaggtcagaagtcatacaagatgaaactttttaggagtctgagtcatttgaggccatccaaaaaccattgtccaagattttaccatgtacgcaaaaccaaaccagccctctagtagggtactgaagatatcaaaggtgaggaccaatctttcttgtccatcactagcacctaccagagtctggcatataggaggctcgtttgtttctgtacttaggaggcttatagtctagacaagaattggcaaattgcagcccatgggccaaattcggcccactacctatttttttagataaagttttattagaatgcacccttactcattactgacataccggctatggtagttttgttttttgttttgtttgtttgtttgttttgagatggagttttgctcttgttgcccagactggagttcaatggcgcgatctcagctcactgcaaccttcgtctcctgggttaaagcaattatcctgtctcagcctcctaagatgctgagattacaggtgtaagccaccacgcctggtccttcatcatttttttttaatggcttttaaagttcacaagaagaaagactatttccgaaatctgtttttcctcattttgtttattattattattaaagacaatgctgtaaaatatttaacatatcgtaatatataataagtatgaattatatttctatatgttctatgctatacgtgtttcttattatatgttccatactaaatataaattactactctaagatggcccccagtgatcccaccttttggtgttcacatctttaatttcctgtgagtgtggcatacacatgaggtggtttgcttcttttttcttcctttttttttttttttttggttgttgattcaagttcttgctctgtcacctaggctggagtacactggggtgatcaagctcactgcagcctcaatctcccaggctcaagtgatcctcctgcctcagcctcctaagtagctgagactaaaggtgtgcaccatcacacccagctaatttttttggtttttagtagagatgaggtcttgctagtttgctcaggatgctcttgaactcctgaggtcaagcaatcctccctccttggcctcacaaaatactgggattacaggcatgagctaccgtatccagccccttttccttctttcttcttcttcattttcttttttttaaaataagcctgagttcctgaaccttgctgctttattttttgagatggagtcttgctctgttgcccaggctggagtacagtggcgcgatcttggctcactgcaacctccacttccctggttcaagcaattctcctgcctcagcctcccaagtcacggggattacaggcgtgcaccaccatgccaggctaattttttgtatttttagtagagacagggtttcaccatgctggccaggctggtcttgaacttctgatcttgggatccacccaccttggcctccccaagtgctgggattacaggcatgagccactgtgcccagcttgaaccttgcttctaaccaatagaatatggcgcaggtaatgggatgtcacttccatgattaggttataaaaaaccatgacttcttgttgccagccaactctttccccttccttgctttggtgaagcagctgccctatggagaggctcacatggcaagatgtgaagttagcattgaccaacagccagcagggactggagccctcagtccaatagtccttaaggaatgcagtgaattttgcaatcactacatgaacttgaaagcagatccttcctcagtcctgccttcagatgagacatcagctgggctggcaccttaattgtagccttgtgagaaatcctaatacggagaacccagttaagctgtgctcagacacttgattcatggaaactgtgagataataaatgcgtgttggtttaagctgttaagttttggagtagcttgttacacagcaatcgacaaccaatacacataccattagtcacaagcagtaattctagggtcaggcactcaatgtagccactattatttccaagttattccaaagagcccccatctaaaaggtagcagaaatcttctctattttcctagttagtccagacacatgccacaccctgtttggagtctgcccagtattcttttatttacttatttgagacagagtctcactctgtcacccaggctggagtccagtggtgtgatctcagctcactgcaacctctgcctcccaggttcaaatgattctcctgcctcagcctttccagtagctgggactacaagtgcatgccaccacacctggctaatttttgtatttttagtagagacagggttttaccttgttggccaggctggtcttgaactcctaacctcaagtgatccacccacctcggcctcccaaagtgctgggattataggcatgagccaccacgcctggccaatgctcagtattcttgaaagtaaaatgacaaacttgatgacagttgtaattagataaagaatctcatgaagcaatagtaataaaatgtatctaagatctgcattaaatttaaactttatactgttatagaaacagcgtaattacagttcccagcaggaacaggattacattttttatttcctcccaaggcaggacctaaaaaatctagaagcctgggataaataacataaaactaaggtatcaacagtatcactgtggtggggacaattcagccaggatctttacatatgatagaaaaggcttctctgagtccacagcttcaccccctattcctcagaaaatccgccccagagccctttctcacaaaggaagattggctgcctgggtgtggtggctcacacctgtaatcccagcactttgggaagctgaggcaggaggatcatttgaggccaggagttcaagacgagtctgggcaatatggcaagaccccatctctacaaataataatttaaagaattagctgggcacctgtagtcccagctacttgggaggctgaggcagaaggatcgcttgagcccaggagctcaaggctacagtgagttaggatcttgccacttaacttcaggctaggtgacagagcaagaccccatctctataaaaaaaaaaaaaacaaaacagactggttcttgtttcattctgtacaacttcaatgcggtcattagaaaaggtacaggggaaatctcaaaaccttgacatttcagagatgagcagctttttcattcccctggctaaggttcaaaggatttcttagtccagcattgccatgggctcacagcatttcctagtaatattatatttcttcttatccataaaaggcagccccttccaggacaaaggatttttcatacagattgtctcatgcaattgtcatggaattatgctgaggcatgtcgccaggcaatgtcattaccttcttactaatgaaaaaactgaggtggtttcaaagcttgcccagggtgatttagctcctagctattcaggccctttccacacatatcccagctctgtgctctctgtggtacagtgaacgcatcgtagattcagattggaattcaagctctgcccaggaagcatcagagcctgctctccactcccaacatcacctacttccctcccttccccacacctactaacaacatcattagtcacaagaaaaccctaagcaaaggaagaatttgacaagcaaaaaatatcaaactttgaggtctacaggcagatctatcctacaccagtgaattctaaaatgtaaaatgcttcccaatgtatgccgctgaagagtgaagtgagagcaatcattatttcctagacggtttttgagctgggcaacctgggagtcacagaggtgagcaagaacttggggtgggtgggagagagatattaaggaactaaaaaaacctcagaggcaggaaaatgcaatggaaaggcccagcaccggcgcaggtgggagatctgggggaaagagcagagctggggaaaggtagttttggagtcacctccaaaagtaaggcagctcatgcagccttgagaaggctttattccagggagttagagggcccatggaaggtgtctgcaaaggaaagaaatctgatctgcacagcactcatctgacagggggaagggtgactgggaaggtgagagcctgggagggagactgttcaaaagtcaccctggaaacagcatctccttgtcacagtttcttcacctggaacaccaagtggttctaccttattacctccaccatcacactcagcaacaacactcagtgcatgaatctagccacagcaagaagaaatacaggcctgggccgaacgcggtggctcacacctgtaatcctaacattttgagaggccaaggtgggctgactgcctgaggtccggagtttgagaccagcctggccaagacagtgaaaccccatctctactaaaaatacaaaaattagccaggcatggtggtgtgtgcctgtagtcccagctacttgggaggctgaggcaggagaatcgcttgaacccgggaggtagaggttgcagtgagccaagatggcaccactccagcctgggtgacagagtgagactgtctcaaaaaaaaaaaaaaaaaagaaagaaatacaggcctgaactagggtggtggcagccagaaaaatgtgcttaaaatgaaggcagggtggggctgccattcttttgtctagaaaatgaaggaaaaaaaaagtaaataaaagactggggctggttcccataggataagaatgctgtcatttccccagatgtttattttggagactcggcctcaatccacaatgtacttttatagtaaataatgaaagttaccaggagaaaaccctggttatttttacgttcaagcgtcatccttagttgttagggacaatggcctcatttttaccccattactattgactctataattaggctttaaagttatattcatgtttaaataatacaaagtcataggagctttataattgacagctacctggaagcaaacccttcagggtaaaataagtctgtcaagctgaattaattttaatgttagaagagtcaccaagctattaatacaaagactgcactcccgaaagacatacaaaacatcatagctttctggaacaaaatataaactttgaaacttttgatctacagagagacaacttatattccccatccagactcactaggaatggcttatttgaatgaaaaggcagtagaagaggcagataagtaaatagaaataataaacacataaaatgatacaataaaagattactcttactagcaatcaaagaatgacaagttgatgaaaacatagacaccattttatgcctattcagttgacactattcaatgttttcaatgtcagcagtggagatgaatgaatcctcacccaccttgctgctggccttgaaattagtatatgtattactgatggccacgctttatgtacccaaaacactaaagatatatttgaagcaatcacctcatttacagagccttttccaacaggaatacttcaatgaaaggactcttactgaaacaaatttttttttttttgagacagtgtcttgctctgtcacccaggctgtagtgcagtggggagatctcggctcactgcaacctccgcctcccgggctcaagcaattctcctgcctcagcttcccaagtagctgggattataggcatgcaccaccatgctcgagtaatttttgtatttatagtaaagacagggtttcaccatgttggcaaggctggtcttgaactcctgacctcaggcgatctgcctgcctcagcctcccaaagtgctgggattacaagagtgagccactgcacctggccacaaaatttttgattggcgtcattagttataaaaagcaggaatggaaaccacatgagtgtccaacaagatctcatggttttacaattttttttttttttttctgacgcagggccttgcactgtcatccaggctggagttaagtggcatgatcatgactcactgcagcctcaacctcctgggcttcagtgatcctcccacctcagcctcccaagtagctgggaccacaggcaaatgacaccacaactggctaatattttgagaaaatttttgtaaagacgaggtttcactacattgcccaggctgatcccaaactcctggcctcaagcaatcctcccacctcaacctcccaaggtgttgggatgatatgcatgagccaccacgcctgacctaaacatttttatgttttagtatagctattaaaaataacagctatttttaataacactatcagatgaaacgtaggaaatgttttacagtattaaccgtgggggtgaggcagaaatcagaattgtgttctataactgcagctttgtaaataatatgattgtttttagaactaacatttgcactgaaagatacataattctctgtgtgtttttccttccaaaataatctgcaattaataatagctatccactccctatatccaaacactgctgagcaattgctcatatactgggtacatttcatgcaatttttacagcacacacaaaaggaagggcttatcctcattttgtgggcttgaagaggttaggtggcatacttctccagggtcacatattgaggtttcaaccaggtctgtttgtccccaaatctcttacgatttgtcctggtgctgttcaaagggggagaaaagttggatcaggccattaggattatgcccactgatgcttacttttttttttttttttttttttttgagacagagtctcactctgtctcccaggctggagtgcagtggtgtgatctctgctcactacaacctccgcctccctggttcaggcaattctctcctgcctcagcctcctgagtagctggaattacaggtctatgtcaccaagcccagctaatttttgtatttttagtagagacagggttttaccatattggccagcctggtctcaaactcctgacctcaagtgttgcacctgccttgacctcccaaagtgctaggattgtaggtgtgagccaccactgtgcccagccactgatactttcttaatatcattctgtctctttgcaaatgattacaaaaacaaaaatggtagcatggaagtgggttcatggaatccactgtgcatggtgcatggaagtgagctcagaagggatggtttgcatgtcaaggcagaagagttgaaacttgccacattttgtcccttgtattatacctttctggtgtgttagtaaacagaagattccatctccctcctaaggatggtgagctgcatgaaatgtagtctgggtccaccatttcctccaagagcccttgctgatcctcagcaaagatccccaaccattacttagcactaaggacaatggaccttgagtgccttggagaggggccagagacaaagatagcttgaaaagtcagtggcccaggccgggcgtggtggctcatacctgtaatcccagcactttgggaagccgaggtgggtggatcacctaaggtcaggagttcaagaccagcctggccaacatggtgaaaccccatctctactaaaaatacaaaaattagccaggcgtggtggcaggcacctgcaatcccagctacttgggaggctaaggcaggagaattgcttgaacccgggaggtggaggttgcagtgagctgagaccccaccactgcactccagtctgggtgacaagagcaaaactctatctcaaaaaaaaaaaaaaaagagaaagaaagaaaagtcagtggctctccttagtgatctgtatccaaagctgtggcttcagctgcaaatacaaacagatgctcttaaaattcccacatggctccttttcatttgtaaatctgtctcaaatttccaaatatttatatgtaaacatgttccaaagcttaaacagacactaaggtgattggcacattaagtatgattagggcacttacttggtatcttttctagatactatcatggtttcctgaacatctaagactggtcgacagagccttacctctcattccatctgaaggttaacacctttacaaattctgggtctgagatatttaatcactgtctcttatgctgtatttcaagtcagcttagagtactcaacttagattacaaactcttccaaggcagcagagttcatatcctaagttttggaccaagattctactgcaaacatatggttaatattttataggtcccttggaaatacttgcatttggcttgaaatatctacagagcttcctaccaacagtcagcaattctatctgttctggctttcagagtttgaacaggtcaaatataaggagtgtgtccaagcttctcctacaaatctgatcagtttaagcacccatggtaagacttctgatgtaaggcttctgaaactccccatgttttcctaggatgatggtggcgtgcgtttacagagagctaactatgtgttctatgcatcaggctctccactatgtattcgcattagcttactttgtttgaggatcaaattattatccccattctacaaataaagaaactgtaactgagaggttaagttctttgcccaaggacatataaggggtaaccagaataaaatcccttggagacatgctgccacaagccaaggaacttccagaaactaggagagaatcctgaaacagatccttccccagcaccctcacagggaagatggccgtgcaaaaccttgatcttgaacttctggcttccagatttgtgagacaataagcttctgttctttaagctgctctgtgtgtggtaccttgttacagcagccccagctaactaatatatggcttgaatgtgtagctttaacatcggagagggcctttcaaattccttaattccaacaaacagaggactccacagtcaggtactgcaaatttgttacttaatgtctttaaattctgaatccacctttgccaagactatgtgcacaaaaggaaaaactgtggttaccttttgtaacaagttatataaataagaactaaatgaccatgttttcttttctctcttctaattacccaaaggttaacatgctattttaaagtttaatttaatttaattttgcagcttacccaggtttaacagttatttgcagagaataatcagaaggaactgcaactggtgtttaatgcaaataaggccaggctgctgaactagggatgactcatgcaggccttgtgcaaacatctagtctgatttgcatttaagagaaaaggtacacctatagaagtatccaacatgtattaaaacatcttcaaaatgttttggagttttaaagaagtgcccattaaagatgctttctgctccacctcttaaaaaaagcatggccccaggaaaaatgataatgtattctagaacttttttctgctgtgatattttctcctcccaatcaatgtttgcttcccctttaaaatctctgtgtactttcatgggtgcagtagcacatggtgatgagggcttgggtttgattgagcaatgctcaccccatctccagcccctaccccacaaaggcaagtagtacagagaatatatatacttatgattctgacataaaataaaatgtaaagccaatcaaaatgtttgcatattttttgcttttccacattccccttctccatagacctagacttcaatcaacctgcatctcctataaagagaaaatgactctcttgaatgcaactggactccaatgaaaacaatcctctttaactctcttgttatcataatactatttataacttttactcaattaatgttattataagctcttatatattcaacatgttaccaacctgaaaacttacccccgaattaacctgatttaggtgaagacaccctatagaactctgagttgagtcaggaagattgatccattatttaggaaacagagctcactgtcattgtcccctgtaggtctagggaggaagcaggctctggctgaattgtctagaggattctctcccttccagcaaccaatctccttcccaccccatctccactcttgtgagcaaaccttcagctgtccatcaataaatcatgccagggataaattcccaacaatagcaaatctaactggcctcaacttgctattttaacactttgatcctaacttccgagagctctttttaaaaagaaaggaaaaaaatggaattagtgtaagaatagagagaagagcattaaggataaactaggggtttagtgccgggtgcagtggctcacacctgtaatcccagcactttgggaggccaagtttggtggatcacttgaggtcaggaatttgagaccagcctggccaacatcatgaatccccgtctctaccaagaatatgaaaattatccaggcatggtggcgtgagcctgtaatcccagctactcagaaggctgaagtacaaaaatcgcttgaacctgggaggtggaggttgcagtgagccgagactgtgccactgcactttagcctgggcaacagagtgagattccatctcaaaaaaagaaaaagaataaactaggggtttaaatagtccctaaatcagcaatcagaaataaatcaagagtacctgcacactgcacaactcaaagaaaattactgaaaagcctttaaatgtcacatggatttgaactttactattagatatctggagctaattaaaatattttcaaagcatgttttaaaagtgctctgaatagactgtgctctggatttacatgatgccatcctttcaaatatttcggagttgtgacataggctcttctacaatattcatcaatgaaaaactgagctacactcaagagcaaaagctggtgtttgggccacaaaacggtcacctccaagtgctccgcagctaggcctgccttatatatcagttcctaggctcattctggctattgccctacccatcctcagagtccaacctactcttttcctccttcatcttaacagacgtgtctacagtgaatttgtgtcttagttttccaaagcttaaacctcaggtacagaaaacaatgttgcactaaccatgacagctaactttgtgcatgtttgcatgtgtcacatgagtatttaaatattatcaatgtttggctgggcacggtggctcatgcctgtaatctgaacactttgggaggccaaggcgggtggatcgcttgagaccaggacttcgagaccagcctggccaacatggtgaaactctgtctctagtaaaaatacagaaaattagccgggcgtggtggcgcacacctgctataatcccagccacttgggattccgaggcacaagaattgcttgagcccaggaggcagaggttgcagtgaggagagactgtgccactggaccccagcctgggtaacagagcaagactatctcaaaaaataaaatagaataagaaaataaatcttatcaatgcttgttatggcttaaacattagtaatttaggctatcaataaggaatgttgggctaggcttgtggctcacacctgtaacccagtactttgggaggctgaggcaggaggatcacatgagctcaggagaccaggctgggcagtatggtgaaaccacagctgtacaaaatatatatatatatactaaatttagcagggcatggtggtgtagctgtagtcccagttacttgggcagctgagggaggagtatcacttgatcctgagaggcagaggttgcagtaagccaagatgctgtcttgaaaaaaaaaaaaagggaatttattttgctgtctggaccaaacacaaaatacaattacactcaccatactctgaaatcagaatcaatgactctcaagaaacagcttccataggtcaaatggggatctacaaggcttccagattatcttcaaaatctgttgatagacatttctgttgtgcttcattatagaaattactagattttcacatatgcgttagaacttggagaggctctatctgctctgactgtgcccattgcaggccccaccctagctccagccaccttctgctccctcacaagtacactcacaagggcagctaggcagcttcattccttttccaggtcctcaaatcccgatgtaatgtctttatcatttgtactttaacaacttactgcctgaaccattctttgcattatggcttgtattgtggttgtttttgtttctaacagagtaaaaatccaaaggtgcaggcaaggcatggtggctcatgcctataatcccagcactttggagggccgaggtgggcagattgcttgagctcaggagttcaagaccagcctgggcaacatggcgaaaccctatctctacaaaaaaatacaaaaattagctgggaattatggtgcgtgcctgtggtcccagctacttgagaggctgaggtgggaggatcgtttgagcccaggaagcagaggttgcagtgagccatgactgcaccacggcactccagcctgggcaatagagtgagaccctgtctcaaataataataataataatgataataataataataataaatgataatctaaaggtgcaagatcatggcctattcctcttatttctcaagtggggcagaatcaagaaatggttaagggctcctgtctgaggttagacagataggggatgaaatcccagctctaaggcctgctacctgcagaagcttgggaaaaatattcttagtaagctcctacttctccatttataacatgaagataatggttaccttacagggtccttgtgaagcttaatcttgatcccatgtaaagcccttagtagcatgcacagtatgtggccccagatatccactgagtgaggcattccagtgattcatttcatcagaaattcagtaacacacacagatataattcttatatttcccccttcgataaagcttagtttagtttattattaaccatcgtaaacctgaaacatcagggaactgaagttttcaagtgaaaaacagagtaggaaaacaataaaaacttttataattgcacttcacagcttgcaaaagcttttcagataccattaacatacttatctctaaaacatcattgaaaagtagattattttcattttattctctgcaatagctccattgcccagaacagcatgtaacacacagtagaactttcataaagaactaccaaatgtagaatcaagctcagagttcaaggctgtatccaggttctcagaaatgacaagatgtagaggaaccagaaccagatcttagcatttgaatccaaatcctgcatcctttctcctcaatcacactgtctccggcccccagggtaaggttccacagaactgtaattatttaagacattctatattttctagatgacaataacttcaagataagagagtagagtgcttaaaaaaccccgattaaagaaaaaaaagatctctcttgtgtcaacaagggaagagagaaccagtaatataactacttggatacagatttttgctttcctcaaagtatactcagcaaaccaccttgatcatggtatgaacaagtgaaacaaaccacatttcaaaaccaggttgaatgaaaagatgcattggctgagcttacttggaaataatatggaaagagaggaagtggacagatctatagataaaaacaacattggccttggccatgaacaagggggttcattttactatttctacatgtgtttgaaatctttctaaattaaaacaaggcaacaacaacacaacaaaaactctccttcacataaaccaatgtattaacatgaggtcaccactgtgtaaagcacatgtgtactaatcaccaacacaggctctgaagggaacacatgctttatgcagccattggctccatcttgaaaactcagatattaaataatcttttcatagacagttaagaggagattattttaaaaaatgaaatacaggccgggcacagtggctcacgcctgtaatcccagcgctttgggaggctgaggcgggcagatcacctaaggtcaggagttcatgaccagcctggtcaacatggtgaaaccccatctctactaaaaatacaaaaattagctgggcttggtggtgcacttctgtagtcccagctacttgggaggctgaggcaggagaattgcttgaacctgggaggcggaggttgcagtgagctgagatcatgccactacataccaccctgggctacagacagaacaagactctgtctcaaaaaaaaaaaaaaaaagaaagaaagaaaagaaaaaaaaaaagatacatctgaatatttaataaagtgaaaatgttatagaaaactataatgttttatgagtcagggccactccatttgcattggacttgaggaggcatatttcttctttggttaaacaggaatatttagcatttacttgttctttttgtgcattacaatttttttcttttaagaatcagtttcagcctggcacaggggctcatgcctgtaatcctagcactttgggagcctgaggcaggtggatcatttgaagtcaagagttcgagaccagtctggtcaacgtggtaaaaccccgtctctactaaaaatacaaaacttagccaggcatggtggcacatgcctgtaatcccagctactcaggaggctgaggcaggagaattgcttgaacctgggaggcggaggttgcagtatgccaagatcacaccactgcactccagcttgggtgacagagtgagactctgtctaacaaaaaaatatatatatatatatattatgaagtaatattgctgttcctcagtttatcatctgtaaaatgagtaaaaacaatagcagctgccttttacagctgctgtgaggataaaatgattcaatatatggaaagctctggaatagggcttgacccaaaggaaggctcagtaaatattagctgttgtttttcttatgtgagataattaaatactaggagaagaaacacatcaccaaattgacacttcagggacagctgagaagttactacagcccacgccggggctcaaatttactttcgtgtgttgaatcattaatagcaagggaaatacctaactcgtaacctactgtctcaggccacaggaaaatgtcaccctagtagtgagagagatattaaatattttactctaccagctgctcagagcaaagcagcctggggtgtatccattactgcctttttcagatctcctgaaagatgtcacaaaccccaaactctggaatttagaatataatatgaacaaggcaacttagagttggtatctttgcatagtgagtaaatgtggaatttttcagaatgataaagtggttttgtttatggtgtttgtttttttaagaaatagaaattgtctttacatctgacacctctgccacaatatccagtgtatatcttgccaataagagacacattacaccagccagcctaaaatagtctcaggttgtttaccaacaatgtgtaattgtgcattggagaacccggggctgaaagtattcatatattcatgttacactcccatcagatttgccttattaaatggttctaatgctagcatcctacataaatggcaaaattcatgcattatataataacatcaacatttgggaagggaaagattataacagacactgaatctcttaattttttctctaccaagataaaaaaaaaaaatcctggacatgtgcttgcttcggcagcacatatactaaaattggaatgatatagagaagattagcatggcctttgcacaaggatgacacacaaattcatgaagcattccatttgtaaaaattaaaaaaaaaattaaaagccttgataaaatgtcctgcggatttgacagtttcacattgacgcttaatcaagttaattcttgattatttgtgtgtttactgactgatgtagttattatccatgaatcccaggctctggtcagctgcctggcttcacataagtttacacaggcaaactcccaaagggagcttttaacttttaactgtttaaaaagcggttagaggtgatcaatattctaattgtttccaggccttgaaaacagagaatcctatattctctcctgttctctacagagtcacagcagtgcaattccaattcaatccaatccccagccataacataattaacggcgcagcactgccagggacagacagatgaagagggcttgcacgcgcccagacaccaggctcactgctgaaccatttgagcttaagttacatatagttcattatccccctttacccctaaatacttcaggggtagtctctcacattctcttacataaccatagtagaattatcaacttcagacaatttaacattaacattcacagttatctaatagtctgatttcgtcattgacccaatgatgtcagttatagtattatttttcctctagcacaggatccagtctagaatcaggtgttactttaggtagccatgtcctttaatctgaaacatttccacaacatatatatatatatatatacacacacacacacacacacacacacatatatacacacacacatatatatatatgaaatatttacacaacatatatatgtgtgtgtgtatgtatatatatatatatttgagactgagtttatctctgtcacccaggctggagtgcagtggcatggtcttggcttactgcaacctccgcctcccgggttcaagcgattcttgtgcttcagcctcccaagtagctgggattacaggcgcctgccaccatgcccagctaatttttatatttttagtagagacacggttttaccatgttggccaggctggtctcgaactcctgacctcaggtgatctgcccaccttggcctcccaaagtgagattacaggcgtgagccactgtgcccggcctccacaacctgtatttgtcatttacaacactgacattaaaagaatatggtattccttctctctctctctctctctttttaaaactgaacctcccacttttgggctttctctgtcatttcctcgtgatttaattcaaggtctctgttcttgctggaacatcacataggtgatgctgcgtcctttcagatgtgacatctggaggcacgtgaggtctctgccccttgtcggtgattgcattttgattttatactttggtcatgtggtcaacgtgttgtttgatttctccactgtatgtattttttgaacttgtaatttgtggggagacacttttaagacatcgcaaatgtcccgttccttatcacaatttcctcctaaacgtgacactcatggatgattctcccctgatccagtctctactacaatggccatgaaaggatgatttcacagcacccatcccctccacgcatattggtgagcctgagcatgccgctgtaagcatagcctccctactttccacttattagttagtaatcaatatggatgtgtaaattcctattttttctccaatggcatataattccttactgtccataattattttggtgtccacatggtccctggtttggccaatcaaagcactttcaagctagcactgtgtccttgtgacaggctcccatcattctttcagcatgtccataccttgtgacaataacaagatgttccaggctcaagttgtacctctcctgccccagcctgtaatcagccatttctcccagtacccctggttcctttgaatgggaaatgataatagagaccaagatcttggcacttgatgtgcttgttactagcggggtgactttgcttcttggtcctggtcctttgatggatagagctaagtaaaaaatgtatacacacacacacatacatatacacttatgcacacacgcatgtacatgggaatacttatacatgcatgtatttcagaaatcagttcatacctattcttctgattccaattgattcccacaatgttcttttcccccatctcccatttcctttctatatgttccttctttctcagtgagaaccctggctctccaaaacaataactcatttgctcaatgctaaaatacatctaaaactgtttcagagttgctttgccagtatcactacataaagtatatcgtaagagtttaaaatttctttgcgagtttccctcaccacccaactttagacaagatggagcatatctcatagaatactgtgttcgtagctccctggattatttctttttctcccctcttcactgtggttatggaattcatttgaaatacaactgggtttcttcatttcatgttgctctcagttttaggatttcccctatccctattatatatatacttatatttaaatataacttaaaaaaatagggatgggggtctcaccgtgtagctcagactggtcttaggcgggaggatcatttggtcctcagctcaaacgatcctcccacctcagtctcccgaagtgctgagattataagcatgagccaccaagtctggccccatccttgatttaaatttatttttgaatatgtaggacattaacaggctccccaaagccaaaactatgcaaaagggtgtcttagacaagtaaccctcctcacatatccccttctccttgttcccacccaccctttgttggtaatcgactttactgttttctgtttatccgtcctgtgtgttttacaaagataagaagataggccaggcgcggtgcctcacgcctgtaatcctagcactttgggaggctgaggcgggtggatcacctgaggtcaggagttcgagaccagcctgaccaacatggagaaaccccgtctctactaaaaaaaaaaaaatacaaaattagccaggcacagtggtgcatgcctgtaatcccagctacttgggaggctgaggcaggagaattgcttgaactcgggaggcagaggttgtggtgagccaagatcgtgctattgcactccagcctgggcaacaagagcaaaactctgtctcaaaaaaaaaaaaaaaaaaaaagatagttgtatttttccttatgtttccttttttcttttacaaaagtagaaaatatatgttcttttgcacttagcttttttcacttagcaatatctcctataatcactagaagtcacttctcaggcaactgtttgcaagtagagaaatatttatgtcttatgtctatgtataaatcattttcctggaaaacttaaaagaaatccataggccgggcatggtagctcacgcctgtaatcccagcactttgggaggttgaggcgggaggatcacaaggtcaagagatcaagactatcctggccaacatggtgaaaccccatctctactaaaaatacaaaaattatccgggcgtggtggcacgcccctgtagtcccagctacttgggaggctgaggcaggagaatcgcttgaacccgggaggtggaggttgcaatgagctgagattgtgccactgcactccagcctgggcgacagaacgagattccatctcaaaaaaaaaaaaaaaaaaaaaaaaaaagaaatccatagatcccacgatggcttgcttccctttctttctctgttttccaagacagaagtcctcatctaccaccctaggtccttaaagtctagctttcctttaaagactcaactttaacctaagggtagcatattactgcagtgaatttatcaacctctaggcgagatatttacaactccagggaccttccctaagcaaaatttcaatctaaggtgatagctccaatagcagcaaccaagtaaatattcattgagaatttttaaaaaatcaccttgtgaacctttaatccctaacagataatctggtaactcatggcaagtggtcatcaaagaaaccaggaagggccgggcacggtggctcacgcctgtaatcccagcacttcgggaggctgaggcgggcggatcacgaggtcaggagatggagatcatcctggctaacacaatgaaaccccatctctactaaaaataaaaaaaaaagaattagccgggcttggtggcgggcgcctgtagtcccagctactctactcgggaggctgaggcaggagaacggcatgaacccgggaggcggagctttcggtgagcaaaaattgcgccactgcactccagcctgggagacagagcgagactccgtctcgggaaagaaaaaaaaaaaaaaaggtatttggatgactcagaataggccaccatcgctgttgggaaactcctagtcctgccctgtgcaaaccaactgcagcttaattgtctctgactggcaattgctaccaccctcctaccattcccatcatgtaggagagctgctaggaggtccactcactttgtcactagcacccaaattcaaaggcactagaaagaagctatcactccaaaccctctacataccagcaagaaggaggttggtgctgcagtacctggatattccaaattggccaatctctcccaatctctccaatatacaaagatcggggggaaaaaatgactaaaaattatcctcccacatagtgattttaattcccggtagaaatgtaagtggaaggaagccaaagatgaattcagtacaataatatcatgattaacaaagtcttgggatgaacatttcatcaacacaatcactctgggataatgcctgggtggatgagatacttgagtagcttctgcttctacatgtcctagaaccagcagagggaaagggcctgtccctaagacccctccagctgggaacagagcctgcagccccagagatgcctgaggaaccccctctgtggccagcctatctccaccttcgtctttgctcttccaccttccccaaactgaacatggtttgttttaagggaaagagcagctagtggcttccacaagatccagcccaaaagtaatgcacattctggcacttaacccgaatctcctgcaacctcttctcatcttcatgaagcttctgacaaggaaatgtggctatactatatcctcctctttgttcaccaaggtaataaggaagatactttttatttttttatttaagatggagttggccgggcgcagtggctcacgcccataatcccagcaccttgggaggccgaggtgggtggatcatgaggtcaggagctggagaccagcctgactaccatggtgaaaccccgtctctactaaaaatacaaaaattagccaggcatgatggcgcgcacctgtagtcccagctactccagaggctgaggcaggagaatcgcttgaacccaggaggcagaggttgcagtgagccgagatcgcaccaccgccctccagcctgggcaacagagcgagactctgtctcaaataaaataaaataaaataaaataacataaaataacataaaataaaataaataaaataaaataacataaaataacataaaataaaataaataaaataaaataaaataaaaaataaaataaaatataaaataaaataaaataaaataaaataaaataaaataaagaagccctgaactcatagcctcaagcaatccttccaccttggcctcccaaagtgctgggattataggcgtgagccattgcacccagactgtgttgttgttgctatcagggcaactgtgatatttatcttaagaaagttttagattcaaatgcagtggcctctctgaagattcttgagataagacaaagagtgggagagaactattctctactctagcatggcaccacgagcagtacggccttagcaagtcacatcctcacctgggctcaggttatcatctgtcagtgagggttcttgaccagatcaatgattctaagatgtggccacacatcagaatcccacagtgtgcttttaacagcaatagtttgttgaacctgaacccaatctactgaacctggaatggggaacaggtaaagtctgtccctgcatttctccagaagatggctgaggtcctttctggcactaaatctcctaattctataggtttttttcttttcctatttttttttttaatggactaggccaggtacagtggctcacgtctgtaatcccagcactttgggaggctgaggcgggcggatcacaaggtcaaaagattgagacctttctggccaacatggtgaaaccccatctctaaaaatacaaaaattagctgggcatggtggtacacacctgtagtccaagctgctcgggaggctgaggcaggaaaatcacttgaacctgggaggtggaggttgcagtgagccgagattgcgccactgcactccagcctggtgacagagcaagactgttaaaaaaaaaaaaaaaaaaaaaaaggattattactgaatagttttaggtttacggaaaaatggagtggcaatccccacatatcctttcagccccgtgccttagtgtacgctgttcacatcttgcattagagtggcacatttgttacaactgatgagccaataatgagatacacacacacacacatatatatatatatattttttttttcttttgagacagggtctcactctgttacccaggctgtagtgcagtaatgtgatctcggctcactgcaacccccatttcccaggttcaagcgattctcctgcctcagcctcctgagtaactgggactacaggtgcccgccaacacgcctggctaatttttgtattttcagtagagacagggtttcaccatgttggccaggctggtcttgaactcctgacctcaagtgatctgcccgcgtcagccccccgaagtgctgagattacaggtgtgagccaatgtgcccggccccagtaatgacatattgtaactaaagtccctagtttacatgaagtccacagttcactagggttcactctttgttgtgtggggtttggcaaatgtatagtgacacacatggtacctagttgaaagaatgccctcttgcattaagtcttactctcaagagtggaacacacagtaaaggcagaagaggagagcaataggctgcttatatcccgtgatcctcaagtgatgacaaatcgaagatatttacagtgaacagtggtgcatgtgcccagcaccataaacatgaacctacttacttttttgctttttcattgttcctttttaacacttggaatatctttcctacagcaatactctctgttacttaaactaccaaacccattatctcctgatgaagcaatgtgcttcccaaacgtagtaattcaaggctgtgtctttacagccttgaacaatcttttaaaaatctgagacatagcaaccagatgttgatagagattacttctcttgatccaaagataactggcacttggagttctaagaaagtcaggagttcaaagaatgagaatctaagtgagggaaaatgaactccttgaacacacgttttttgcactgttatcaagtcatttcttaggattgattgtcagaatgaaatggttgttaaaaaattgtactctaggccgggcgcggtggctcatgcctgtaatcccagcactttgggaagccgaagcgggcagatcacctgaggtcaaggttcgagaccagcctgaccaacatggagaggccctgtctctactaaaaatacaaaatcagccgggcttggtggcacgtgcctataatcccagctactagggaggctaaggcaggagattcgcttgaacctgggaggcggagattgcggtgagccgagatcgtgccacagcactccagcctgggcaagaagagcgaaaccccatctcaaaagaaaaaaaaaaaattgtactctaaagatagagctctgtttccacaaattgtatcagaaacgagaggtaacatttcaacatttaagctttcatatgcatttatttttcaaattccaacaaacattttcaagtttgttagaactaaacagaacctactagaatcaattctattgatgtcatttcttttaacatagcaacttatcacacaataagtactcaatgtctgggttttaattgaccaagtaagtaaattgaagaaagtttggaaaactttctcttcctctgacacaattcttcactgttcttttttttggggggcggggggatgaagctttgaaaaatttatttttgcataacataaacatgtcaatctttccctttagctccttccactcctccttcagtgtgccgaagagatactgagttcttccagatttttgcttagctgggtagtttctaaactcaacagactctccaggtaggtagttcctgcacggggctttcctgtcactggatctatgacttttccaactttgaaaatgatcttggcctgttcatgtttcacatgcttcgttcatgggacaggtaaagctctgagaagcacgatatccccagctgtgcactgccgaaggccatcgtgaacaaaggaggttttccacttattataatactttaataaatagggatccagaacaagcccggtcactctcgctttagcagtcttttgtatttttgtcccaatcaccttccccacgatccatctggcatggacagatgaacgaacgacggacatgatgtggctttggtcacctccgccatgactgtgcagccacctgccccagggagcctgccttccttccttccttctttccttccttccttccttctttctttcttcttttcttccttccttctttctttctttctttttctttctttctttctttttctttctttctctccctctttctttctttctttctctttttctctctttctctctttctttctttctctctttctctctttctttctttctttcataccgagtcttgctctgtagcccaggctggagtgcagtggtgtgatctcggctcactgcaacctctgcctcctgggttcaagtgtttctcctgcctcagcctcctcagtagctgtgattacaagctcctgccaccacacccggctaatttttgtatttttagtagagatggggttttaccatgttaggcaggctggtctcaaactcctggcctcaagtgatccacctgcctcagcctcccaaaatgctaggattacaggtgtgagacactgtgcccagcctgacactattcttgaattaacttttcactttcagttgtcaaaaaaaaaaaaaaaaaaaaaaacagaaaataagtgttggtgaggctgcagaggagttgaaacacttttgcactgccagtgggaatataaaacggtgtagccactgtggaaaacagcataatggttcctcaaaaaataaacatagaattaccataggatctagcaatctcacttctgggtatatacccaaaagaattgaaggcaggaatccgagcagatatttatacagtagacccatgttcacaacagtgatattcacaaaagcaaagaggtagaaacaatccaaatgctatctgataactggatacacaaaatgtggtatagagacaaggaactatcatttggccttaaaaaggaaatcctggcacatgcataaagacatgctaagtaaaataaaccagtcacagaaggacacatgatgtatgatttcacttacattaggaatgcagagtaggcaaattcagagacagaaagcaggatgatggttgccaaaggttgggaggaaggggagttgtttaatgagtgcagagcttcagttggagaagaacttctggaggtggatggcggtgatggctgcacaaccatgtgaatgcccttaaagacactgaagtgtataattaaaaatggttgggtcgggtgcagtggctcatgcctttaatcccagcactttgggaggtcaaggcaggcggatcacaaggtcaggagttcgagaccagcctggtcaatatggtgaaaccgcgtctctactaaaaatacaaaaaattagccagacatagtggcgggcacctgtagtcccagctacttaggaggttaaggcaggaaaattgcttgaacccaggaggtggaggttgcagtaagccaagatcgcgccactgcactctagcctgggtgacagagtgagactctgtctcaaaagaaaaaaaaaaaaaaaggttaaggtcaagcgcattggctcacacctgtaatccgagcactttgggaagctgactggatcatctgagggcaggagttagagaccagtctggccaacatggtgaaaccccgtctttactaaaaatacaaaaattagccgggcatggtggcaggtgcctgtaatctcagctactcaggaggctgaggcaggagaatcgctcgaaccccggaggcagaggttgcagtgagctgagatcatgctattgcactccagctggggcaacaaagcaagactctgtctcaaaaagaaaaaaaaaaatgttaagatggtagattgtatgttgtgtatattttatcacaataatttttttttcttttcttttctttttttgagacagagttttgctcttgttgcccaggctggagtgcaatggtgccatcttggctcactgcaacctctgcctcccagattcaagtgattctcctgcctcagcctcccaagtagctgggattacaggtgcctgccaccacgcctggctgattttttgtatttttagtaaagacacggtttcaccatattggccaggctggtctcgaactcctgacctcaggtgatccacaggcaggagccaccgagcccagataacaataaattttttttaagtactcagttgttctttatctcctttggagaaaggagaagagatttaaactgatttcaactaaaaaatttcctgatcagacaagttgccaaaagaataactggaatttcttctctgactgtgtttctcaagtatctagccaggcagtgtgctaaaagctagggacagtgggaaaccaaaaatcacacatcctaccttaatggggctaagagttcagcccaatggctctgaaactttagcacatatgaaaatcctctggtgggcttgttgagcacaaattgctagcacctacactcaggatttctgactcagggggactgggctggggtccaagactcttcatttccatcaagctcccgggtgatgccagtgctgccggtacagggaccaccctttaagaagctctagggcaggaggagggacttgtaggtaaagaagcagtttcaatcaagtgtgctgtgatgggaatccacccagtatacatactaggtaatgcatccacctgtcctaggagaggtcaagaaagcctttcctagaggaggtgttgcagaaattgaggtctaacctgagacctacaggacatgtaggagtcagacaggtgcatgaaagggacagagcatttcaggtggagagtgtccgatttgcacaggtctagaggtaagaacagcctgttcttgaaattgcaaatctttccatgtcatgggcagtcagagagtgatggggaaagtaatgaataaggaagagagaggtgaggtctatcaaaaaggacgttggaatcctacagtttatccacaggataaaaggaagccaacctcaggcaggcttgcagcattcaagaattgaagctctaagaactaaggtgagctcatcagctccgggagaaggcataggtccagtagagtcgcagactaagcaggtggggaagggggcagttgtacatgcccctctaattctcgcatcatctcacacaacccaagctccatttcctcagaaagccttctgctgctcaggtaagaaaaacccaaggccattgtgccatccagtacagtggccacgagccatgtgtggctattaaattagctaaaattagaagccagatcagcagttgcactagcctcatttcaagtgttcaacagccacctgtgactaggggctagaaacaggaacgcttttgggccaggctcggtggctcatgcctgtaatgccagcacttggggagggcgaggtgggtggatcacctaaggtcaggagttcgagaccagcctcgctaacatggtgaaaccttgtttctactaaaataacaaaaaattaaccaggcttggtggtgcgcgcctgtaatctcagctactcaggaggctgaggcaggagaatcgcttgaacccaggaggcagaggttgcagtgagccaagatcgtgccattgcactccagcttgggcaacgagagcaaaactccatctaaaaaaaaaaaaagcagaacactttcatcatcccagaaagttccctaagccagcactggtccaggaaatgaagtataagcaggattagatctaagacttgccaggcattttggttttactgcctgaagccagcaagcaactggtttgggtcttcactcatgaaaacacacacacatacaaatatatacacagagagctctaaattgatttttaaaaaatctatagggtataaagcaagacaattaacaattatacattatatacagtctacaaatatcctagatatcacttttataatgagatataaggaattctggctgggagcagtggctcacgcctgtaatcccagcattttgggaggctgaggcaggcagatcacctgcagtcaggagttcgagaccagccttgccaacatagtgaaaccccatctctactaagagatacaaaaattagccaggtgtggtggggggcacctgtagtcccagctactggggaggctgaggcaggaaaattgcttgaacccaggaggcggaggttgcagtgagcaaagatcatgccactgtactccagcctgggcaacagagtgagaccctgtctcaaaaaaaaaaaaaaaaaaaaaaaagaaaagaaaagaaaagaaaaaaaagaattttcttaagctactaagaagaatcctagaatcatacctattctccaaagccatctgtaaatcctaaaaataaccagtcaagggaattgagggaggaaaacatagtccagattagaattctaaaaggccatttttactgtttacatgccaaaaaaaaaaaaaaaaagctaagcttttaaagctttctctattgtgtattttaccaaagtcagtatgaaggattcaaaatattacatagctaatccttactccaagttctaaaaataaaatgcaagagacggttgcatgccaagttggtaacaaatccctatgccaaggatagaagtggaaattgatgcaaggaggaaatgagttatgctgtaaaatgaaacacacacccaagagaaaggcttaacccttgggctgaccatagcagcaaacactgtaaccagttaaaaagtccaagaagccagaggtagatgataattctacaaattcagagatgttcttgttttcccagctgctccacaaggactttaccagcctagataaacagagcccgccttccactttccatgaaggatcaggtgggcagcttcccagtgagtaaggtgggtggctgagtatccttatcttgatggtgagtgacaggtggctttgggaagtgtactcagacaggacagcttccttgctcaaccgtggtctgacccaggcatattaaggggaggaccagctcagaaagaaagcagagccaagtgtatgcattgcgcaaaacctctgatggccaggaaggcctggccgccattccctagagccacgcattctgcctgccccacgactcttccatcctcagagccgtatttcctcctgggcctgccctgccagatctgattggctcccttctccctgctctgctattaaatgccttccttgggttcaaataaagctagtttctctagagcctttctaggtatgcccgtgcgccttcccactccaaacccactgtgaatggaagaccattcattcaccaattcctcatttagttaaaaatcaagacccaccagcaagaaactcagtgcaaggctccttggaggtgctggggtaaagcaagaaactgctagtacttcattaagccagtaggcaactggtttgagccttaattcatgaaaacacacacacttcactctaaattgatttttaaaatatcataaatgccatcggactatctcaaatggcaagaaacggccaaagatgactccagagtagataattgaaatggatgtggggaaagtaagctcattcaggagcactgagcctggggcatcccaaatgcacagcaaatagtagatctgatcgaagaacttttatttgtaattctgatttcataatgtattaatgatagcaccagctagcatttattgagccaatgctatgtgtcaagtaccataccaaacatttaacacacacaaatgcatttaaatatacaaggatccaataaggtaggtcctgttattccccttgtataaatgaagacactgaggtcaagaaacttgtccatggtctcacaagtgtgcggtagagtccagattaaaacccagccagcccagcatcctgctcataaaaccctcatgctgagaactgctgaactgcatttttttttttttttttttgagacagagtctcactctctcactcaggctgaagtgcagtggtgcgatctcagctcactgcaacctctgcctcccaggttcaagcgattctcctgcctcagcctcctgagtagctgggactacaggtgcatgccaccatgcccagctaatgagaactgctttttcttgcactcaggcagaagtgcctcagcctagcaagcttccctaggtgcccacccaccccagctgccaatgggaaccgcagtccaatatttcacatttcggttagatgtctcaaaatttgtttagcactttccagagcagtccacaaaatgccacttgccttgacaggcctgtgttctatatgcaatggcaccacagaatttagttaccatccactttgcctccatccagtttgggatcttcctcactccgtgagacacaaggctcctttctcctgcctccagccggcccaccctcagaacagggtacccctggagccaaattgttgaggcaggagctccagatgggtagaaatgggatagaggagaaggagaggctgagacagggactttgagatgcactgcaagccagccagtggggaggctaccccttgggggcaaaccacacgcaggggacaggtatactggggcttgcctactgcggcagatcgcaagttcatggcaatatacctgtaggtgaaaacatgtcaacatgccccaatgttaaggacagaacagcaaagggacagtcagatacgagttaaagtcaccgttcttctagaaacatggatgtgaattttgtttgttttgttctgtaacagagtctcgctctgtcgcccaggctggagtgcagtggcacgatctcggctcactgcaacttctgcctcctaggttcaagcgattctcctgcctcagcttcctgatagctgggattacaggcacgtgccaccacacctagctaatttttgtatttttagtagagacagggtttcaccatgttggtcaggctggttttgaactccttttcaagtgatctgcccacctcagcctcccaaagtgctggaattacaggcgtgagccattgcaccctgcctggacttgaatttttgtcagaaagagatttgcaattaatgctgattgcaactgatggcagaattaagatggtaagtcttatatcacaaccacctcctaaaatcaaaatggagctgtttctgtaggagtcagactacctcctttagaggatatgggagtagtccatcactcattcagacagttttattaagcgtgatatagtctacctctctcagcactgggcgtggtgcatctcctattgttaggcaattcccttacttcctgatccttcaattcacttacttcctgatccttcaattcactttctttataattacgaaatggtctgagataaccaggttccccttgctcaagcttccaaaaatcaggctgacaagttacatttggacatctgctcttcaaaagccaaaggcagagttttctgttaaataatgagctgtccaagcatattttgattcattcaggccacatacagcagcaggagtttctgggtggtgcctcaggtctaaattttactgtaatcctacaggttagaaatcaatgagctgatcagaacatatccagtttccaaagatatgagtggcaccatcaatataaattagttctccagtaatgtcaaagggcacacttagcagtgctgtcagaacaaccagaaaaaccacattcaaaagggaacacagcctaaggcacacaactcatgataaatacctgggaaaaaaccagttagctctgcctttagctgttcccaccccaattttcacgattaaaactacaatcgacatactaattagtcggcagacatctctataatgtttatactcctaaaaaacatgttatgttggttaactgaacctatacaatacttagaaatctccctaaagttatcctaaaaacaaaacaaaaacaaaaactttgcaagctttctgagttcaaacctgtaattttgttacctatcagtgctttataaaagagctaagataattataaggaacaagcctcctaaaatgtaaaattccattgttcctctactacccgcccatcagtggcaaataaacaccttaccatgacattcactgtgagtattgctagcgggagaagtggaggagaaagcagtcaattatacctgatgatcagggatggagagagacaggagggatgctgagttggccttgaaggtcaagtcccaagctgggccactatctgattgggagatagaaagtgagaggagaaaggcatttctggaaagaaatccctgggggcaaatattctgcagcactgaaggcacacaggattagttcagttactaaagtgcgggtagacaggggaggaagaagaagagagttggaagaggagactggaaagcagactgaggcaaggctgggaaggccttgggtgctagcggcatttggaatttgtgtgctaagcagggagaggccatctgagttctcccatgcattgagtaaacaacacgtcccgacctcgtggcaggtattcagtcagctgctggtgagcaacgtggctcctgtccctatgaagcttaaagtctaaggtaaggcagaccctaggaattcggcgcacagaagcctctctgctgtgatggagaagtaacagggacgatgaggacatagagcagggaagggggcctaggaagctattctggaagaagtgagttggttcctgaagttgaagcacctgcagaggtgaggaggtggggagcagaagtgcaggatccatctgtgcaaagaggctggggcctcaacaacatgaactgttttaatcagatttgcattttagaaatgataaccctaggcctggagcggtggctcatgcctgtaattccaacactacgggaggcagaggctctactaacaaatctctactaaaaatacaaaaattagctgggtgtggtggtgcatgcctgtaattccagctactcaggaggctgaagcaggaaaatctcttaacacaggaggcagaggacgcagtgagccaagatcacaccattgcactccagcctgggtgacagagcgagactctgtcttaaaaaaaaaaaaaaaaagaaaagaaagaaatgataaccctgaccaaggactccaggaaaagatggtgttaatctgtggccaagacaagagtgcagaaagtccttactgtcctctggcaacaggggccaaaggcggaggctaataaggtggtgcagacagaaagggtgggatttctggcagaactttcagaggcagaggcagcattttacaactcacttcatccgggcagggggtctgggaggaaaaacattgaaaaaggtgcccagtttctagccttagcaactgctgcaggcagctgaactctgcaagggttcttatttggccctgacattctatacgcacttattagcattttattcaagaagagggtggttcccccaaatgtttccatatttagccaaaggaagctaaatttcaaacttcaagtgtctactcaaacctaagactgaacccctcaatttccctcataactccattatcccccaggcttcctcacgtcagtaaaaggcaaccccatctcccaggtgctcatgccaaacacctagagtcatgctggagtctcatcttccctcctaccctgctccctattcatccgtaagccctaggctctgccttccaaatgtttccagaacctaaaacctctcctcacctccctgcaagctgcttggctgaagctctgttctccctcacccggattagaggtagccccagacagcatgcccttcagtctagctccaacatggagggcaggctgattctttccaaaggtaatcagatggagttactcctcggctcgaaactctgcagtgggttctcacttctctcagagtaaaacccaaaatctacctgctctctttccctctcatctacagccaccctgctgtctccctggtcctggagcttggggccacacagtgtctgttcctgtacctggaatgctcttcccccgtagccacaaggcttagcccctcaccttactgtcctagctctaatgtcacctttttaggagcccaatcaatcaccaccatatttaaaccccagccttgccagtcccccttctttacattgttgtccatagcacttctcatctgctatcagactttaaaatttattaggctgggcacagtggctcatgcctataatcccagcactttgggaggccaaggcaggtggaacacctgaggtcaggagtctgagaccagcctggccaacatggcgaagccccgtctctacaaaaatacaaaaattagctggacatgatggtgtgtgcctgtaatcccagctacatggtaggctggggcaggagaactgcttgaacctggaggcggaggttgcagtgagctgagattgtgccattgcactccagcctgggcgacagagtgtgagactccatctcaaaaataaataaaatttatttattaataatctcttctaaccggaatgtacactcccagagcaaagggatttttgcttattttgtttagctacatccccagcacccagaatacagtacaatgtacggtaactatcttacagatgtttgttgactgaatgaaaagtcacctattaataaggctccctgagtcacctggacaaaatagtaagccctcacctcttttgcccttcatgcttatttatttttccttgcatatatcatcaacgtgtgataaatgttaataccacatattagtgtgtttattctcttctccacacaagaatgccaactccataggggcaggaatcttgtctcttttctctttgttgtatgatgaacacccaggacagagcctggcacagaggagatgagaaagagaaggaaggagagacagaggtcaggtgtggtggctcatgcctgtaatcccaacactttgggaggccaagaggggtgcactgcttgagcctggagagttcgagaccagcttgggcaacatggtgaaaccccgtctctacaaaaagtacaaaaatagtagttgggcgtggtggcatgtgcctgtagtcccagctacttgaaaagctgagtcgggaggattgcttgagcccaggggtcaaggctgcagtgagcaatgatcatgtcattgcagtccagcctgggtgacagatggagaccctgtctcaaaaaaagaaaagagaaagagaaggaaggagggggagagagacgaaagaaagaaaaagaaaggaggagggaaggaggaaggagaggggcggaatggagggaaaaggagaaggaaagacagaagaaggaagagagggaggaagggagaagggaggaaagagaaagaaggagacagggagtgcggaaagaaatagaaaggaggaaggaattctaactccatattatcaaggtcacagatgagtagcctaaaataaaaaattggttgttctacctagagcaagagattctgtcaggattctgtcagagagcagtgaaacaactggccatgtttttttttttttttttttgaaatggagtttcgctcttgttgcccaggctggagtgcaatggtgcattctcagctcactgcaacctccacctcctgggttcaagcaattctcctgcctcagcctcccaagtagctgagattacagacatgtgccaccacacccggctaattttgcatttttagtagagacggcgtttctccatattgatcaggctggtctcaaactcccgacctcaggtgatccgcctgccttggcctcccaaagtgctgggattacaggcgtgagctgctgcgcccagcctaggcatttctttaaaatctatccattcatgtgctccattagtcaaaataaaaggcaatatctagtaatgatgccaggataaggagtaggctacattggattctaatcaaaggaggcatgagtcactgaaaaaccatcatcatttgttggctgctttcttctatagtttctgaacaataaataagaaggattggccaatcttgttacttggcataataaaccaggtaagcatacttgatgattcaattccatttggaaccgatactacacgttaaggaaacaaaactaacattggcattcagctgagttctgtccaacgaccctttgcctccactgtgtcttgttgggcatgctgctataattttaaaggtaatgactgtaatagtaccacctcgcattcatgtgagttcacgtgaattaggcttctaccactcttgaaagtaattttaattatctcgtttaatgaccttcaccttgcaggaaagaaacagagacatgaagaggttaagacaagtgacggaggtctcagggccaggcagggaaagagtgacttgttttggagggtgggagcccacccacacaatcaaccacagtcacccagatctgcccactgaggtgagagaaaggaggggaaataaaacagcaagcccttttctttcctcctcatatctgttctcaggactcatttcctgtctaactcagagtcaccttagatccttaaaagtgactggaaccaagtcactaaaaaaaaaaaaaaagaaagaaaaaagcaattatttttcacaatgtgaagccttctttgggagaagttggctagaaaataataggagaaaaggctggaacaactgtctaggacatttcctaatatgttattttcaccccccttccctcaaaggtcaacaagatactccactgtggaagcttcttcaaaagcagttcatctggatgtcttcaatactccagatggcttctctaagtcctactccaggccgatcgttatgcaatctgttatcttcctttccaactgttttctcaggcttttttttttttttttaaatagggtatcactgtcgcccaggctggagtacggtggtgtgatcacagctcactgcagccttgacctcttgggctcaagtgattcctcccacctcagcctcccatgtagctgggactataggcatgtgccaccacacccagctgatttttacattttttgtagagatgggatttcgctatgtttcccaggctagtcttgaacttttgggttcaagcaatctgcccggctcagcatctgaaagtgctggaattacaggtgtgagccacagtgcctagccaggctaatttcttatctattgaaagctggaatccaatgcaggaatccaatgcagaaactatgtaagatttcaatctgttatatatctaccatcttcctgagacaggccattgaaagtcaaattccactgtcatttgttccaggggaaaaaagaaacatgaatatatatgtttgtaaacacaaagatgatttctaaaaagataaccaataaactggtgatggcccgtgcctttgggtaggagagttgggtaactgggttaaaaggaggcaggaaaactgacactttattttttatttatttatttattttgagacagggtctcactctgttgcccaagctggagtgcaccggtgggatctcggctcactgcaacctccgcctcccaggctgaagtgatcctcccacctcggcttctcaagtagctgggattacaggcatgtgccaccatgcccagctaattttttgtagtttttgtacagacagggttttgccgtgttggccaagctggtttcgaacttctgggctcaagcgatcctcctaccttggcttcccaaagttctgggattacaggcgtgagccaccttatctggccaaggctgacacttaatacccttttgtacctttcgaaggttgtaccatttgcatgtattacttattccaaaaattaaatgaaaaaacaaataataggtggaacaaaactgaagcttggaaactgtgggagccctttatcaggaaataacaaacatgatggtatcacatcttgactttccagtgatggtcaacaacagaagcatttaccagatagtgagctccccacatgcaagcggcaactttaattgtaccttaaatctttgcccttgtattagttatctgttgctgcctaacaaaatacccccaaatttagcagtttgaaccacaagtatttataatctcagtttctttttctttttctttttttttttttttgagacggagtctcgctctgtcgcccaggctggagtgcagtggtgcgatctcggctcactgcaagctccgccttccaggttcacgccattctcctgcctcagtctcgggagcagctgggactacaggcgcccgccgctacgcccggctaattttttgtattttttttttaatagagacggggtttcaccatgttagccaggatggtcttgagctcctgacctcgtgatccgcccgcctcgccctcccaaagtgctgggattacaggcatgagccaccgcgcccggcctataatctcagtttcaatggatcaagaatctgggtatggctcagggtctcctcccaaggctgcagtcaaggtgtgagccagagctgcagtcacctaaaggtcggcctggggatgatccacctccaagctcactcacagggctgttggcaggattccatcctcttgggctgttggccagaggccagctccagttctttgccatgaatgtctctccatggggcagctggcttctcttacagtaagtgagagcatgagagagcatcagcaagagggaagtggggtgtttctgtgccccagcctcagaagtgacatcccatcactgtggccatattttattcactagaagggcatcaccaggtctaacccctgctcaagggagaggatttcccagaaacagaagaaatcacaaattacacttcacaagaatcctgagatattttagaaaggttccaaatttggccaaaagtagcttaagaaggcttttatggaccaagcataagaagtttagcagggctgggtgtaatggctcacacttgtaattccagaactttgggaggctgaggtgggcagattgtttgagcccaggagttcgagaccagcccaggcaacatagcaaaaccccatctctacaaaaaatgcaaaaattagctgggcatgtgcttgtggtcccagctactcgggaggctgaagtgagaggattgcttgagcctgggaggtcgaggctacagtgagctgttactgcaccactgcactccagcctgggcgacagagtgataccctccctcagaaaaaaaaaaggaagaagaagaaggagaaggagaagaagaaagaagtgtagcagcagagagaaattacttcactcaaaccagcattgagagaggcagagaattaggagcactcacaggcagagctgaaaggctcccagaaggggcaaaaataaaatgtaaaattaacctttgaaatccaaagttggtatcaggtatagcctaatgttcactttttaattttagcaacaccgaacatggtatttctaccttatttttagtataattatccattcttaacttgtgtaatgaaagaaaaaataggggcgggcatggcggctcacgcctgtaatcccagcactttgggaggccgaggcgggtaggtcacgaggtcagcacttcgagaccagcccaaccaacatggtgaaaccccgtctctactaaaaacacaaaaaaattagctgggcgtggtggcgggtgcctgtaatcccagtgacttgggaggctgaggcagaattgcttgaaaactggaagacagaggttgcagtgagccgagatttcccactgcactccagcctgggaaataagagcaaaactccgtctcaaaaaaaaaaaaaagagaaagaaagaaaaaataacaaaaataacataggtaaattaacagttataatattaaacagtctcttttggctaaacctgttataaatcaccacggcatataaatgttagagcttagatgctgaataaaccaactggccttgaagcccacatttctaattctcataacagatttattatgaatctcaaatttcacaaatttgtctgtctgtgtaaaattgttttggaagatgtcaataaatgtagaggaatgtttaaaatctgaagttggaaaaaggtaaagcaaacattagtttttaatcttttgctcacttgagtaaatccttgaaaggattaaaaaatatccaacttgtgaaatttgtttaaagtccttttaaaataaaaatgcataaatgtataattactctaaacctaactgaagactttatagaattcacccaatttgaaaacaggtcttctggcctgtttcccaagtcattatgcacagctgtgggaaacatcctgttgtatgtttacatatattaacagcttcaggaatttcacaattaaaactatggtgggctggtttccaattcaggcagctgggtgagggggtgtggagagcaggcaaaccagaaataaaaacaagcttcttgaaagatgggggaaaggaaatcgtaactacttagtaatcaggagtccatatagtttgccagttctactaaacgctggagggatttcatttaaaccctaagaaatacacttgttcaatcattttgcagccttcaaaatctctcagttggcttcaaccaagaggttgcctgatggaggtaatattgtacacgatatgtaaaaaacttttatttttttctgtggacagtttcaccccaacagaaggaagctgtggtttcacctttctctcttttgtttttccagcatgcctgcccctcgtcctgacataactgattaggaaatgatttctaaatggtcaagagtccagcctcgatagccacttctctgattccaacagaatttctacagaagacaatttccttgtctcagcaaggtatgtatgatatatgtggcctggccaggccggctgctcaaacagagctgtgtttgggtcagcccactgtttaaaatgttaaaatcagacatgaagaccattcacataaccactgctggtcagatatgagtcatctccaagaacaccaaaaaaggaagcattaaatgctgattggtctccttcaaaatcacttgggaaactccagaaagggaagggataaaacacaggaacttctacttcttcaaagtctcccgaggtgatttttaatactcagaagttgggactgagttcctgatctaggttgaagtgtaatgtgaattccattcttgccagtaggtgcgttattttaatcattatctttattcttgagactgtttcactccatctggagacagctttgttgagttttggcaacactgcagagttgttaaaatcataaaacagaaccacctgtttttgagctatatgggttattagaaaaaatatccaaaattctttatttttacaagaggaatccagagctcagaaagattaggggaggtgtgagtgctgaacttgtatttagtctccctgggcctcagtgtccccatctgtaaagtgaaaattaatatattcattaattgatcagttattgaatgcctactaggttgtggactccagggatgaagaagatacgtgatctctcactataacttaaatcctaacacagactgttacagttcaatatgggaaacataggtgggtgcagtggctcgcaccagtaattccagtactttgggaggccgagatgggaggatagcttgatgttgatgccaggagtttgagaccagcctgaacaacataaggatacccctgtctctacaaaagaagaaattttaattagccaggcatagtggcacacacctgtagtcctagccactcaggaggctgaggctggaggatggcctgagtccagaagtttaaagctgcagtgagctgtgtatgatcaggccactgcactccaacctgggcaacagagcgagaacccatctctaaaaaccagtaataataatatttaaaatacagtaaatgccaggagaagacaatatgctcaggttgcagtgggagcttggcaaaaccatacctaacccagcctgggaagcacatgggaggcctctgccatagggcagaaagctgctgcagtgaaatccatttaattggagaatggagcagaaagggcagaagatgcaaagaagccctgctgtctatagaatttgcgaaaataagatgaagcaatagtttgccagcagcaaataactacacagatatgagctatgaaattaagtaagactcatcaaggccacccacagctgctgcgttgcagacgccaatccagcatccttacgttacaccattcatttatttcaatcattttccccataggtttatatctagacatttccataaacccaagtaaattttttattatgcgtgtaggcatcctataaagagtagactcttacattgtctactttccaagccattctctgtcttgactacgcatgagagaatcagccaggtttatcccagactggctaataagactctggcaaggagaactcaggcatcaatgtttttgatgcttcccaggtgaacttgagaatctcatttatcaaaaagtcaagaatgaatggtgcgcacacacacagacaaaaaattcttcagtcacctctggtttatgcatttttagaaaggctccagataatatgaaatctatttgtttgagccttgactataatatgattcttttaggaaaacagatttactgtctaaatgatacctggctcagattaattctagtttgtctctttttttttttttttttttttttttttgagacagagtctcactcttgttgcctaggctaaagtgcaatggtgcaatcctggctcactgcaaactcgcctcctgggttcaagcaattctcgtggctcaacctcccgagtagctgggattacaggcacccaccaccatgcccagctaatttttttatttttagtagcgacagggtttcaccatgttggtctggctggtctcaaactcctgagctcaagtgatctgcctgcctcagcctcccaaagtgctgggattacaggcgtgagccacggtgcccggcctagtttgtcttttctaaagatgcactggctgaagggaggcggggacgttcctagaagtatgatgggtgacagagaacacactattcaggttaagaatgctctacagagagactataaagtagaaactgtaaagattacaggggaaagagggcatctgatggaacgcaggcatggataagataatatttatatatctttatgtttaacaaaagttctaacatgcttactgtggtcctttgaaactgatgacaggcacacaacagggtggacacatatggtttaacaaacaagtcttttttatgtatttatttcctttaataatatagaaagactgtggggaataagaactttaaaaatatcgaatatgcctggtagatgctgccttaagtgaagcaagactcctgatattcacaagaagagacaatataaaaggaaattgaagaccgggcatagtggctcatacctgcaatcccagcaatttgggaggccaaggcaggtggatcacttgaggtcaggagttcaaaaccagcctggccaacatagtgaaaccctatctccactaaaaatacaaaaattagccaggcatggtggcacgcgcttgtaatcccagctactcaggtggctgaggcaggaaaattgcttgaactgggaggcagaggttgcagtgagctgagatcgcgccactgaactccagcctgggtggcagagtgagaccccgtcttaaaaaaaaaataaaaataataaaggaaattaagcattgaagaaaacacagaagccgtctcctctaccatacatcgaagggcgcatggtgacagagctgttgtcatttcaacagtatttctgggcttcccctgttctctacatccttgctacttgaaaaagaaagagtgagcagaggacataactcaggagggactcctactttaatttttactggggtgggcagagactacgctgaagaaatgacatttgggccaaaaggcaaaagataaggagcctttcagaggaagagcttttcaagcgagaaagcagcaaatctgaagttcctgggacaggaagggactcgtcatgcttcagaaactgaaggagaaaaagaatggaatttgcagggggaagccggggtcagggcgggctgggcatagagagctgtggagagaaggtagctgttgttaaaaccacagcatgagctactgcaagggttggcaggatctgagtgggtgctctggtttggaaggggcagggtagaagtgtagccctcatgtaagaaggctactggaatggtccaggagagggaggatgacagcttgaacctcgcggatggcagcggagatagaggttatcaggtggagtcaaggtcttccagaggtagaagcaacaggccttggagacggattggaaatgaaagcagggtgcagtctggaagagaaaggggtcagagatcaagtccaggcttaagccagaaggcttaagcaccagctagaggggtatcatcttctcaactgatgtcagagttcaatgctcgaggtgctgtgtttaggggcatgcaggagagtattatgaaacgtgcaggagagtattatgaaacgtgcctatgactaagtcctgcgaaaccgtagcattttaagaggactcctacccgtggtttagggtagaattcctcagcctcaaccctagtgacgttttgggtaagatacttctttgttgtagaggctgagctgcatattgtaggatatttagaagtatccctggccttgaccactggacgcttgtagcatcctgaattgtgacaacttaaaatgttccccagggagcaaaagtcacatctggttgactaagttaagtatacttttacaaagtctttaataaactggtgccggtcttctgtctcaaaaagttcacgggcaggccagagtaagagcttcacaaatcatttcaattttctcatgttccggctttgttgacaagcacctaaaattgactttaaaaaaccagacctagtattaaggtggatgctgcctcatcgaattagaaaacaattggagttatactaaccccaaaatacacaagatcttgaaaaatctttatcctttgtcttttgacaacaacataaacccaaaatagagcagtgagtggatataggtgttagctggattttcccctgtatgtaaatatttcatagctcagagttatgggatggtgtttatttcaaataacatttgtaaaaatatctctaacccaaaccaaaatgccataagagtcctttttttcctaagtagatgcttaaaacaaattcccgatatttttgttgcatttccaaagtatggcagtaagtatcaaaagttagtgcaaaaatctttaaatatctatttttgttgttgttgttgttttgtctcgttctgttttgtttttttgagacggagtctcgctctgttgcccaggctggagtgcagtggtgcaatctcagctctctgcaagctccacctccagggttcaagtgactctcctgcctcagcctcctgagtagctgggattacaggcgcgtgccaccatgcccagctaatttttgtatttttagtagagatggggtttcaccatgttggccagtctggtctcaaactcctcacctcaagtgatccacatgcctcagcctcccaaagtgttgggattacaggcatgagccaccgtacctggccgtaagtatctatttgtgtttgtgactattatactaagttatgaagtccaagaaagaacttggttattctcctctggcagcttagtgaaggagtaaaagccataaaattcacttaattaggccacggtggattcttttcattgtagagtcactataaaaacagccaacaattattggttcgatgttgttcaatggccttctctctcataaaacatgtgtctaataacggcagctaatgctagtacctatcagtgtggaaaggcatgtttctgactttactatttaatgtgtaattatagaacaggtgctacaatttaagaactgcgctgggggctgagctacaacatgagtcttgccaaggtgctattctcaccaaggtggccactagtgtaaacacagacaaatagaccagcaatgacaatatagctcagggatgccacacccctaggcccacatctgtcctgcttctcacctgctcaaggtgacaggactaaggaatcctaacacacctttgctgccgtggctggacatcacttcagaatccagctcgtcaaaagcctctcagccagggattctcaatctggagcaggcatcagaatcacctggaagttttattaggacactgattgctgggtcttaaccccagagcttctgagtcagtgactctagagtgcagcccccagtcatgctgatgttgctggtccagggaccatactttgaaaaccagtgtctaggcaaccaccactgatcaagccacatctgatataaaagctagctaccatctccgagatggtaccacctatgctaagatgagaatgtacagggaaccactagaacaaaggaagagtccctcactttggtctgggaaagacaaggaatcaggaaatcttccaggaggaggtagcacctcaagtgatccacccatctcggcctcccaaagtgctgggattacaggcgtgagccactgtgcccagccaagcccctttatttcaaaaacacaatgtgttcttccaatggttcatgaaaactagaaacacaaaaaaatgttaaagggtgtttttaaaaattaaggtttgcttgaaagagatactcttatcttttttacgtctagtaaggggtattgaaatacagcagatatggagaacaacatcgacttggaacagaagaatgacccctaacaacttagagcttagacaaatttgagagtttacaaagactgccagacaggatgttatgttagaaatacatttaagcgatattaaaataagtattcaaatacaaaattttgaagacaggaaacttcataatattcatgttaaattctcaggatcctctggaccggaaatcattgtataatgcctaagatatcgtggcaaacaaaattttacaagcaaataaaatgtactttagttctcacaacggtcaccaatctttatatacccttagtcctctgccaagtgcaattaaagccactttatgcttactgatttccttatgacacacacacaagaacctaaaagacaacataaattcgtctgataaaaagtgagcctaaaagctccatctagagcactgcgagaggagctccatctagagcactgcgggaggagctccatctagaacactgcgggaggagctccatctagaacactgcgggaggagctccatctagaacactgcgggaggagctccatctagaacaatgcgggtggagctccatctaggacactgtgggtggagctccatctagaacactgtgggtggggagtgttggctccgctataccatttcctcttgtaattttggcttctttgtcatgagcttctttttcaaagttggcttttagagcccattggttactgatatttactgattttcagtttttaaaaagtctattcctttaaaaatgctctaaagtttgtcaaacctcaggggttagatacctttttgaatgtcagtagtttttctgaaggtttaacatctatcaaaatagagaaaaaacacctttaaaataaataggcctcatttaaaattttatacatcttctaaagggacctatatagtatccattgtgtagacatgacagtactggataaaagtgaatattagtcccagccacttgggaggctgaggcgggaggatcccttgagcccaggagtttgaggctgcagtgagccataatttgacactgcactccagcctgggcaacagagcgagatccatctataaaacaagacaaactgaatacggaatgaacaaaataaaacctattgtctatccctgctactgaaacacatatattttattgtcatctggacctacaaagcttgaaatgatttacaacctgtacattttaaaaattggaagcttatgacaaatgagatcacagagaggcatggaattacaatgagagggtatcctataaaacatcaggtccatcatttgaagcacgaaaaaatcggagcttagaaaattaactggccgtgcatggtggctcccagcactttgggaggccaaggcgggaggatcacatgaggccaggagtttgagatcagcttggccaacatggtgaaaccccatctctactaaaaatacaaacaattagtcgggcgtggtggtgcccatctgtaatcccagctacttgggaggctggggcatgagaatcgcttgaacccaggaggcagaggtcctggtgagccgtgattgtgccactgcactccagcctgggtgacagagtgagactcttatctcaaaaaaaaaaaagaaagaaaggaaaagaaaagaaaattaactgctcatcactgaactgaaagttaggaaaagagtaccctaacccagttcctggcaccacccactcccccaaaccctgcttcccttgtgtttctcatctgtcccatggggataattcctgtcttgccaactcccaaatgaggagattttaaaactataaagtgctttaaaaatgtaaagaattgctattattagctgaggtcagccagcccattcagtgactcaccagagctgacatctcctgggcttgtttcccaaaaccaggctgctgtttattacaaatcatagatattaaagatggaaaaaatatcacaacacagcccttttaggagaataggaaaataaatcctccttccactcccacccccaaataaaacaaaatgcttggcagatccaggagtttctataaggagcttgaatatacaggaagtccacaaattacaaatgattttgtgttccaagagttcatttctgggtgggttaccagatgaaatataggacacagagttatatctgacattaacataaagaacacatcatttttagtgtaagtcagtcccaaacattgcataggacacacttatactaaaaaaaattactcatcatttatctgagattcaaactgaactgtgtcctgtatttttatttgttaaatttggcaaccctatctctgagtcatttggatcgattttccaaccttcggctgtgaggtctcggaaagaaccctcgccttgtgagtctggaaacacgactgcaatttctggttttgtcaattactagttctgagacttcaggcaagttataattcctttgcttgcaaaaagagaccaggaaattaatacaccacgggactaagtgggtcaatataacatgtggaaatacagtacattgagcacaaaagcagcaccactttgttatactaccctacacacatgaaaagagtgatttggtttttaagtcaggccacacaagccaattttaaaagtcggttttccacaagaaattccctggctttagcaagttcctataccatacaaagcgcccctttcccacatctgagaacgttttgagccatgtatggtggtcttgtccactaggcaaccctgtatcagccctccaccctgtcatctttgtccataaagcacggcttgtgactttgcacaaatgcttttttttgctcacatgtacatactttgttgccaaaaaatagtggattattttacataaattagtgcaaactaaaaggctgataccaatgataggaagcactggcttccgaagcgtttccagcatccccaaacagctccttaaacccaatcctatgttgcaattcccaaaactgtgtctccaacctagacttctgaatcaccaatgcttgacccccgaccacacctaggtgtcccagcaactcaaactaaacatgatcaaagctacattcatcttctaaaactactccttggtctcagtgatgccatcacctttagtcgcttatgttagaaatttgagaattgtcaacaattctcttcttttacatcttcaaatccaacccatcaccaagaccaggattccccttgtgaagtgcggctcctaccttccagttctcatccccactcccatcatcgggcccaaacccccatcctctctctctcatggacactgcagcagcctcccagatttcctctccttgcttctggcctcattccctgcccccacccccatcccccaccaacaaccaacccattccccatatcgcagtctctggattatcaaacaaaaccaggaatcaaatcacatcacgccgctgcttaaaaatgttagtgacttcctatcaggttctctgcagtttggtgcctgcctcccttatcccatggtagccccagcatcatgtcacacccagtattctggcctctcacaattcctagagcacagcactaagctctcacccaccccagggcctttgcacatgcggttcccattgactggaccactcttcccctgactggtactttcttatcctctaggtctcaacttaagtataacctccttcaagagaccccactccctgggccattttttaaattatggtaaaatggacaaagcataaaatttaccattttaactacttttattttatttatttttttgagacagagtcttgctctgttgcctaggctgaagtgcagtggtgcgatctccactcactgcaacctttgcctccttggttcaagcaattctcctgcctcagtctcccgagtagctgggattacaggcacgcaccaccacacctggctaatttttgtattttttagtagagatggggtttcaccatgttggccaggctggtgtcgagctcctgaccttaggcaatttgtccatcttggcctcccaaagtgctgggattacaggcatgagccaccgcgtccggccttattgccttctaagtgatattaagtgcatccacatgattctgcaattgctaccaccacccatccctagaaatttttcatcttcccaaactgaaactcagggtccattaaaaactaactctccattccccactggctccagcccctggcaaccactgctcagttttctgtctctgaacttgactattctgggcacttcatataagtggaatcacaaaatatttgtttgtccttttgcatctcatttatttcatttagcataatgtcttcaaagttcatccatgtagcatgtattaaaatttccttccttttttctttttcttttcttttctttttttttttttttttgaggcagagtttcactctgctgtccatggtggagtgcagtggtacaattttggctcactgtaaactccgcctcctgagttcaagcgattcttgtgtcatagcctcccgagtagctaggattacaggtgcccaccactgcacctttttgtatttttagtagagacgggggttcaccatgttggccaggctggtcttgaacttccggcctcaagttatcccccagcctcggcctcccaaaatgctgggattacaggcataagccaccgtgctcagcgaaaatttccttccttcgtaaggctgagaaacatcctaatcatatgggtacaccaattttgtttattcattcattcgtcggtggatgcctgggttactcctaggccattttaaagtaggtcttcattattctcttagaaatatcttatttttctttaaggcctttatcacagattataattctaatatcaagttgtttcatatctcttttgttcaatattttgtttagtctctatctctcatcacactctcaacaaccccataagctccctgaggggaagggcatgtctgctttgctcctcactgtgtttactgccagcacctggcaacgtagtgggtatttaataagtaattgttgaatcactgaatgaaagaaaatcactaggccacctgaaggccccttgtctttagagtcactgtggaccatgtaatcaattgtgaaggtgagccaatgcatacttacatccacacacacatatttgtagctctctgggcacaaaacattccttttataacatgtcagtctatttgcaactagcacacatttccatggcctgtgctttttttgaaggatgtattacgtgcaccagtagctagtgtgtttggcaatataaagaaattaagtattgacaaataatacaataaggatgaaattttattaattttttttttttacaattaaaaagaattgagacagggtcttgccacgttgcccaggctgttctcgaactcctgagctcaagtaatctgcccacctcagcctcccaaagcgctgggattacaggtgtgagccaccacacccgaccgtaatatacatgaaaaacatcatgctaagtgtaaaaagatgatcacaaaagaccacatatcatacgattccatttacataaaatgcccggaatcggcaaacccacagaagcagagggtagatgagaggctgccaggggctgcggggacaaggcgataaaccaggcagagctaaaaggtacaggatttctgttaggggtgatgaaaaggttctgacgtagattgtggcaacagttgcacagctatgtaaatatactaagaaccattgaattgtatattttaaaaggctgaactgtatggtacatgacttagatctcaatatagttgtttaaaacaaaaaaatccatgtgtatggagatggggagtggctggaaaaagcttaacctcccaattaggcaaaagacaaacaggatagggagggggactaggggcttgtgagtggcaatagctgcagcagcagccctggcaggacagcctgtgggttacagaccgccctcctgtcaatgaagtcaagtcctctgcttcctgaaaaccgcctcttttttctaacaatgttctttcccccaaactaggaagacaggctgatggtaaacacaaagttctctgaaccaaagccttatatgtatgtttctgaggaggctctttataacctagttgcaagcaatctgaacacagcccagcgaatttccagcttttgaaactcagatttccttttgcgacccaggttctgctgagaaagttatctttggctcctctctctctcacaccccacatcccatctgttcggaagtcctgttggcatttcgatctatcaaaataaaagttgcacgtatgcctgtgtccgatcccattctctctgtgtcctttctcctctgtctttctcaagaatctgacatctcagccccacagctaccatcctggcggacactaccaccctgggaaaagcttccaccctcacttgcctggctttgcctcctgcttgaactcccggattgggagccttctgcctggactggtcttcacacagatcacaccactccaaggagcaatgtcctgcactgagccatcttccaagaaatcaaagccaaagtctttacatagcctggcaagccctgcaagacctggctccccttcctctctgcccttacctccttcttctccttccctcccccacttactctttggaggaacagctagataagccaagcactcttaccctagggcttctgcagcaagttatctgtcccctctgcctgggacactctttccccaaaacttcctgtgccaccctctctcctcctgagtgtttgctcaaatatgaccttctcaaggaggttccactggccactctatttacaatggcagcttgcacccttgccctcccattctctcggtcccagtgacctcaaagattcagggcatgttagctgctacttacatcaccattcacagcctaaggttctcaaattgacttttaagaattttcatgttgttctacagaaggagagaaagcctaagactgataacaaaagtctaaatgctcttaatgcagctgaactagacaaataaagtatcagatcgccaagagattaaccatgttaaccccagtattctttttgtggctgtggttggcattaaataggaaagtgggtggacacgtagggatagtagtatttttggttggcttcaagctttgatgagtttttgtgtgttttgttttgttttactttaaaaacctgctttttaaacacgtaaatccttatttggctaattttcagggcacagtgtgagtataaactcatatgagagtctattgttctctagaaactacagattaaggtgtctttaacagactgatgtctaattattacataaaggcatctgatttttataccaggacacctataagcacattattatagaggtggaacatttgataactctgccatgctacagtctgtaactgaccttttgccttgccatggattctaccctaaggggaaaaacaacctgacattaaaaaaaaaaaaaaaaaaaaaagtcaattctatggaatgtcatctctggaaggtggctgtggttagcagagatggccagatagtagggccacaaccctggggcttttacacccaccctgacacagaggaaagagtcacccatagcacagaccagttggatgatagaatggcatatgacggtcatggtggtgcgtgcctgtaatcccagctacttgggaggctgaggcaggagaatcacttgaacctgggaggcggaggttgaggttgcagtgagctgagattgcaccattgcactccagcctgggcgacagagcgaaactccgcctcaaaaagaaagaaagaaagaaagaaagaaagaaagaatggcatatgactgccagctcagtgagagcagctgcaggtgaaaaggagaggcacgtgctgccttcaggtgtcttcaacaacaccctcctcccacattccctgcattcttatttccatgctactctggaggaaagcatggtaataaatactataatacgtggccctgcccatcttatttatgaaggatacattttaccaaactgaataaggggggctcaaaaactgacatgaacaaacagatatgtgtatgcccaggtccatggcagcattagtcacaatagccagaggtgggccaggcatggtgactcacacctgtcatctcaacactaggaggccaaggcaggaggctagcttgagccctggagttcagcctgggcgacatatcgagacacacagacacacacacacacattttttttttcttttattagctgggtgtggtggtgagtgtctgtagtcccagacatttgggaggctgaagcgggaggatggcttgagcccaggagttcaaagctgcagtaagctatgatcacaccactgcactccagcctgggcaacagagtgagaccttgtcttaaaaaaaatttttttaattgaaaaaattacagtagccagaggtgaaaactacccaaatatctatcacagatgaatgggtaaacaaaatgtggtatgtgcatacaatggaatattattcagccctaaaaaaggaaggaaattctgacttgtgctacaacatagatgaaccttaaggacattacactagtgaaataagctagtcataaaagggcaaatattgcatgattccacttaacctgaggtactgtagaatagtcaaattcatggagaaagcagaatagaggttacagggaccaggaaataggaagaagggggtagttactctttcatgggcatagtttctatttgagatgataaaaagttctgaaggtggatggtggtgatggttgcacaacaatgtgaatgtacctaatgccactgaactgtgcactgaaaaaggatcaagatggtcaatgttatgtatattttacatttaaaaaaaaaaagtcaggcgcagtggctcacacctgtaatcccaacactttgggaggctaaggtgggcagatcacttgaggtcaggagttcaagatcagcctggccaacatggtgaaaccctgtctctactaaaaatacaaaaattagccaagcctggtggccatgcctgtaatcccagctactcaggaggctgaggcaggagaatcacttgaacccaggaggcagaggttgcagagagctgagatcgcaccactgcattccagcctgcatgacagagcgagaccccatctcaaaaaataaaaaaatttaaaaactcccatgaaataaacttctacaccaagaagacaagatcataaggaacctctcctcctctcaaagttgtactggtacaaatcagagcacagattttcttttaattcttacaatctttgtagcctgatgaacttcacacacttggagtccttactgtaacaaaagttctggaggttgctgggtgcagtggcacatgcctgtattcccaactactcgggagactaaggcgagaatcacttgagcttaggagttcgagaccagcctgggtaatatcttgagaccctgcctctaaatgaaaaaaacaaaaacaacaacaaaaaactggaggttgatacagcagctactagtgcctgacttagaggactcacactttaatttttcaatataaagataggggcattatttcccagcatgaaatgtacaaaacctacccatctccccaagtgagtaaatatttaaaccacccaagccaaagggttacctatgctgttgtttgtttgtttgtttgtttgtttttgagacagagtctcgctctgtcaccaggctagagtgcagtggtgcaatctcagctcactgcaacctccgcctcccggattcaagcgattctcctgcctcagcctctggagtagctgagactacaggcgtgtgccaccagggtttcaccatgttggccaggatggtctcgatctcttgacctcatgatctgcctgccttgtcttcccaaagtgctgggattacaggtgttagctatgttcttatagaaaatgttaagtgttccttctggatctacagatcatgcacagaaatctcagaggatcatgtcagtaactcactaagttccaggaagagaaaataaggatgtgtacatgaatcacaccacactctataaaataaatagtgcatccaatccatggaagcttccctgaacagcaagaatatacattctgatactaagtgaaggacagtatttggtgcctgagggtttccaaagaggattttctagtgcaactcaatttcaataaaggttagaaaactgttttcaaaagccacctgcactaaatcaaacaaaccgcaactccagtagaacaaaagccactcagcaacaaagtaacaaagccataaatgacagccctgtcaataaagaccaagctactagccaaaggtcaggctccacagtactcattgcagaagtgccaggcttctcaatcacgctgtgggggatggtggccttcgccactgaaaggctgcccaggaacagaggtgaccctcccctccaggagtcaatgtcagactgagagctggtttcccactccatccccaccacagcttccaggcccatttgtcacctattaaatgcaaatatactagattgaaagactgataaagaacacagatcttcagagtggaagtggcctgggctatcccccaggacctaaagaaaccatccctccatgcaaagagggacaaggtcccaagcaggaagagagcagacacctgatctgctttctttctttcttttttttttttttttttttttgagatggagtctcactctgtcgcccaggctggagtacaatggcaaggtctcagctcactacaacctcacctcccaggctcaagcaattctcctgcctcagcctcctgagtagctgggactacgggcgcatgccaccacacctggctaatttttgtatttttaataaagatgaggtttcactatgtgggcaggctggtcttgaactcctgatctcgtgatccacccgccttggtttcccaaagtgttgggattacaggcatgagccaccacgccaggcctctgatctgctttctcaccaaagaagaaacccaactcaggccctctgtgaaccccacagacttccatgaagcagagaggtaattcccccagcatagtctaaagatgaatgaatgaaaggagctataccaaggttctctgtcattagcaacgcctacccaggatccacaactaagaaaaccacacagggagcaatgagcctttcaagaagccacagggttcagaaactgttgagttttaaacaggtagtaattaaaaaacaaaacaaacaaacaaaaaaaccaggagtgtgggtcagaaatggtggttcacacctataatcccagcatattgggaggcccaggcaggagaactgcttgagcctaagcgttcaggagaagcctgggcaacatagtgagaccctgtctctacaaaaaaaaaaatagaaaaaagaaaaaaagaaaaaaaatagctgggtactatggcacacctgtggtcccagccacttgagagcctgaggtgggagaatcacctgagcccaagaggtcaaggttgcagcaagccatgttcatgcctctcccctccagcctgggtgacagagcaagaccctgtctaaaataaataaataaataaagttaaaaatagaaaaacaggagcgtggaggatgagggagagaaaagaccaactgatgtgatgggtaaagggggctcaggagcattccacgggcttctactgtgcaggaagaggtagcaggtgagacagcaaccaggccccctcacgagttctcctgcaaggttaagaggcaaatgagcactctggtcctctgagccaccagggcttaagaacaacagtgtagatcggagacttagaaccttgcccctgctctggggaactctatctttccagtgcctggtgcaaatgggcactgatgtttgctaaataaatactaacttgtagaatgattcctgtttcctacatagcccaggagaaaggcaatggctgggtgagtgatatttacaaagtcatagcaacaacacaacaatgtattaacgactaccttttactgaactgtgtgctaagtcctctacctaagctatctcatttggaactcatcacacagccttgtgaggccatactattattatcccatttacagatgaggaaactgaagcctagagaggcaaggtaacttgccctaggttatgcacctaggaagctatgaggcctgcgttccaacccaggtcaaaagactccaaggctggcaacctctgtttcactgctgcctctggactgcttgcagggaccagttatgaaacatatttctcattgtggaagggttgggcaacaatttatttaaaagtgcagtgcatttataagtatcaaagaaagtaccaatatggccttaaagattcagatgataaaaagttatctgttttttaagaaaatgaggccgggtgcggtggctcacgcctataatcccagcactttgggaggccactttggtggattgcttgaggccaggagtttgagactagcctggccaacatggtgaaacccgtctctactaaaaatacaaaaattagctgagcatggtggcacacgcctgtgatctcagttactcgggaggctgagacacgagaattgcttgaaccagcgaagaggaggttgcagtgagattacaccacttgcactccagtctgggcgacagagcaagactctgtctcaaaaaaaaaaaaaaaaagaaaatgagaaacaagactaatatatacatatacacacgtatatagacatgctcatatctatatacatacatgcacatatatatgctttcagaatcttcctaaacaataccaggtcttcagtgatagaggacctcaaaagatcttagattaggtattacttttagctgggcatgggaatggggattcaggagtaacttggttaacaaaatgaaaaatataacctgtcttctttttatggtattaacactcttctggcagcaaattaattttttacttaataagaaacaaaaaacctacaggcatgaatacaattaatctaactgaatgtcaacagacctgaaaactcacaagatacctaaagacaccactaagaaaaactttccaggagactaaactagaaccaagtgtacaaataaactctaaaattaagtgcttaagcaatttaaaaggcatctctttttagagagatttgggacataaattgttctggggccaggcacagtggctcacacctgtaatcccagcactttgggaggccaaggcaggaggattgcttgaggccaggagttttagatcagcctgggcaacataacaaggccctgtctctatgtattttatttataaaaaattttaaaaaacaacttgttctggtacctaaaaagcaagttcctctgcattcatgagtgcatcggtttctttttcagtaaccgacactaaagagcaaaggtaactaggaaaaatctctctggagttgttagaattacctgcattctgtgaatgttgcttataaaaaactaaaatggaattttaattcataaggcaataaaatcttaaaaatataccagatacctgcaataatagtatttttagatatcaatctaataaagaaagtaagaaaccaacattcaaacactgactatatataaagaacattcatatgttctctgatttaattctttcaacaatccaaagagattgataatatcttttcccctcaacagagcagcaaacagaggttcagaaaacaagaattcatttaaggttatacaattaataaggaaaagaactgaaatctgtgggcatttttatattttccactactccttgcttcaaaaggatggaaaagaaagaggaaagaggaatggacggaaggaaaggaaaagaacattctacagccagatctggtagtgactccattagcactaagatcccctagactgaaaatcagattaaacataaaatcagtcctgaacttgccttaccaccgaagacttctttttgcgaagccatttgctgtaccacattattatttttaaacttctattgaacaaaaaacaaaacaaaacctctcccagttctatcactaggatgtaataacatgtgcacacaggtgtgtgtgttccttaaaatccataaggaaaacttgaaagcagccagagctgacctcacacaggtggcatctgtgttggacagtaataaccaaaagagtcttgctcggcccttaataacccacgcaaagaatcactaaaagttactaaaatacagccactggaaaacgacgaatgaacaaagtggttaatgttccttcccaaaattatagcaaggaaaactccaccacctaatgaaaatcattaagagaattcagaggagttaactgcaggcaggcgtgacttctcccccagaaagtaatcagctaataagcattaatcatcttgtgcacagtctgcgcatttataatagggtttaataaagccttcaacaacaggcccagaattaatgaacggcatcttaggtctaacacaaaagtattccttagcggacgaaaattagcgcttctacttcacatttgctgtcgtgtcccccatatatacgggctcgtattcactatccctggaggctttatcacgcgtggttttttttagcttttgttcctgaaagcagttaaccttcatcgataacctaccgtgtgccgggtgatctccaaacatcccactagttttttctttttttagtttcccatgggtagtggcaaaattttgaaggcaatgcaaccaggaagatgggagcgaatattttctcacgccaacagggaggccagtttccgggagaggaactcggcggcgtctggagctacccaggaagagcttgcagcccccaagggcagcgcgtgcaggccaagggggtcgggtagggttgagcgggtactcaccgggcagaagcgcggcccaagtcctccttacttctgcgtgtcaatcccccttccccaatttgcatccttactgcaatccagtctcccccgtacaaccgtcacggatctgcgctccgagcaccgcccccccccgcaaccagccaccaacccccggcagggaccacaggcacacgcctccgtcggaaaagttgggcagacacttcagaacttttctttcactttggggagaaggagggagttggagaagtgggggcgaggggtgttaaagcactgggccattctctgcaacatctccccgcgccccccaacaagttgcccctcctcgtgcacacagcgaggtgacagcgcagggcaccaaactgctgagggaaggagatgcctgcagccatctcagcggggctggcggacgcgacccgacagtcaccggaaaaacagtggtgtcggtcttccccatcacctcccctccccatcccacaataaagcgcacggaagatgtctgggagtacctggccctgccacaggagctggggaggagagcgatctcaccccctccatccctcccggcaggtgggccgcggtcagatacgtttggcccgcaagtccttttcggacacgttggcatctgctcccaaagagcgccccagcaggacccggtcaccggggtcttccagaggggcggtagccaccgcacaggagccagcggcatcccccaaggagccgcaagccctacctggcttaacccccggacatgtgtgtcgctaccgatcgaagaacccaaacaccccgagatttccctcctctaggcaggtgaaaaccccacggaactctccgcagcgctgcctgcccagccggccgtgtctcgccgtccccgaggcctcgggggctcccagcacctccacccaaatcccacctgtgcgggctcgggagtccgagggcgctgacagctgctgccgccgcatcccggatctccaaagtgcggcgggagcggccagggaacctgcaggacaccgccgggccaaggggcttgggaaggtctgggggcccccggcgccgcacccctgcttacctggcgttcgctgggccccggctggggcatccgcctggtgcgcgccgctcggagcgctcgctgcgcacctggccgctgccgccgcccgcccggccccagccctggccgccgcgctagcgctgcatggcgcacgggggctggccgggggcccggggaagcgtgtctagttggcggcggcacctccggctctcgcggctcgctagtggctcccccgcctttccccgccccgcgtccgtgcacccttcctctgcagccgcccttttgcctccgctccgccggaccggccaaactggtttctccgctcggggaggtgcctctggtttccctccagcagccgcggccgccgagcctcgctggggctggggctggggctggaggcgggctcggccttctcccctccctttttccctccctagggcggagaggggctggactgcaagccccggggcggcccgaggcggcccaggtccagctcctgccccacgccctccgtgcgtcctggagtcaggtgggcacccctttcagtcttccgagcccagcctacgagcccttgcctcgcccagcctgagacccagttgctgcggctgctcttagctccccgggggccgcactcgccaccacacctctccagcccagcgtcactttcccgctgcccttggctggcttggccgtcaccccgggtcgaggactgagccagcctggaaagctggcggggccgcggcgcgcccgggacctgagctccctcggtaaggggagctgtgtcctcttgatgccaagtcatgtttggggaccggtcaccgaatgcgcgtcaaagttcgccgcgtggagggtgaagaaagaggctgcgcctcaagacttccagaaacgtatcctgtgattgcagccagcaggctttctgccgagtccaaacgctatcgagtttttttgggtttggagtcaaaaggagttaaggtgcggcccgtgaaccacgcggtgtaggtggaaattttggactcagcgcctcgttgctggctggtgtctgagcgggtgaatcgtgcctccctggcagtatagacattaccctccttcttgagtagacttttgccgctccccgactatggaccgagtcgttgggataagaatggaggaaaatcaaagatcagagtttgcttaaaatgcagtaggggagccaggactcccacacgattcccagtcacctagaggctcacatctatgcccaagagtccagactcccaactgggtcatcacagaggcttcctacaggaggccgtgcttgatgggactcaaagatccacagctttaaggatcagagttgtgtagagagggtattcaacgggtggccaactggtagaatcttgtctgataccaaccccgaggctgctctaggcttctttttcatgagtcaaacttgatctctgactaggtgctggtcagtcactcaatctatccaggcctcagtttcctcatttgtaaaatgagattggaccagatggtctcttccagcacttatattctgaagctaacgacagaacaaaggtaccgatgcaagagaacatagggcctgttggtgacactggttgatctaagacatttagacttgtttttggtagcacctgcaaaccgttgacaatttaggaccgagcatgagcatgatcaaggttgtgttttagggaaaataatagggagatagtctagagaggataaaactgaagatgggagaatcacttgagaggctgggacagcgacatacggaggagttgccaggggaagtaaaaaggaggaaattcaagggacaccacagaagagagatagggcacgaagtggccacaacctgcaactgactgggagaggggagcaatggaaggtgagccaggttctcaagactgggttatggcatgcaaggagcagcagactccaaaggagggaagccgtttaggaagactctgcccctatctggataaatgccagcaaacctaggaatcaagaggggattccagactaaagggggcaccccctccttgcagatccactaccaagtgctcaacctgtccaagaaaatgttacatagaagagactaaacaaggacgcatccaatctacacctgtacctagatctgatcaataccattctgatgtctgcatttatttacttgtttatttatttatagagacagggttgggtttcactatgttgcccaggcttgtcttgaactccccagttcaagcggtccacctgcctcagccccccaaggtgctgggattacagtcatgagccaccacctgtactaaaaatacaaaaattagccaagcatggtggcgggcgcctgtggtcccagctactcaagaggctgaagcaggagaatcaattgaacctgggagactgaggtggcaggcagtgagccgagactgtgccactgcgcttcagcctgggcaacagagcgaggctctgtctcaaaataaaataatattctttcattcaacaaagatttgagtgtgagtgcctactgtgtgtcaggcagttttctagttgcttgggtacatctatgagccaatcaaatatctttttttttttttttttttagacagaggctcgctctgttgcacaggctggagtgcagtggtgtgatctcggctcactgcaacctccacctcctgggttccagcaattctcctgccgcagcctcccgagtagctggggttacaggcacagccaccaggccaggctaatttttgtatttttagtagagacaggtttcaccatgttggtcaggctggtcgtgaactcgtgacctcatgatccacccacctcagcctcccaaagtgctgggattataggcgtgagccactgcactcggcaagtatcttaaaaggtggcaaatgctttgaaaaaatagaacaggctggactgggagaaggcccctgaaggagctgccttttggagtgctgtaaaagttatatttcttgatctgaatgataattatacgagtagacgcatatgcaagaattcattgacctgtatgcttaagatttatacattaaaaaataatagaccaggcacgatggctcacacctgtaatcccagcactttgggagatcaaggcaggtggatcatgaggtcaggagttcaagatcagcatggccaagatggtgaaaccctgtctctactaaaaatacaaaaaattagccaggcgtgatggtgggcatctgtaatcccagctactgaggaggctgaggcagataattgcttgaaccctgaaggcagaggttgcagtgagctgagattgccccactgcactccagcctgggcaacagagcgaataataatactactactaataataattgagcaggattaagagattaggatttggaggatgagtcacaattttaaataatgtggtcagggtaggcttcttgaaaagctgcatttgaaaaatgacttgcaagaaggtagagtttcatctttgatgagacaaatcctttgaaaacccattttgcatggaacccaccagatggaggcatgttaaaaccttatcctaggcgcagtgcctcacgcctataatcccagcactttgcgaggctgaggccagtggattgctcgagcctaggagttcgagaccagcctgggaaacatggtgaaatcccatctctacaaaaaatacaaaataaaattagctgggtgtggtggcccgcacctgtagtcccagctactcaggaggctggggtgggaggatcctttgagcccaggaagtgaaggctgcagtgagctgtgattgcaccactgcactcaagcctgggtgacagggcaagacactgtctccaaaaaaaaaattaaaaaaaaaaacaaaaccaaaacaaaacacccacacccacacaactccacaaccttatcctagaacacttcccctatgtaagtcttcctcatcttaggaaggaggttctcagagtgcatcagctggtgttgctgatgaaggaattagctcacctggaaaccgaccttgtcctttctgaaagaaccatgccaaattttggggtgccttgtcagggcaatcactggaagtgtctcacatgcaacaattttaaaatgcatcttacatgagtcactgagagatgacttctttgtcctggcagagccctgattccaccagccttggcagccctttctcagcattctcagatgggattgaataaacactctggttttatttagaagtcactctcatttagtaaccaacgagctgctgggggaaatcacgaaatgtaacagaaatggccatttctttttatgttttattttttattatttttttgagacagggtctcactctggcacccaggccagagtgcagtggtgaccattgctcactgcagccattgtgcccagaaatagccatttctaaaagagggtaacaatgattttcaacttttgtagttcataatttcctctgtttcttttttccccccttttcttggcagcagtcttatgtacatttgcatgatgtgggtaggaaagccagggaggttgccaagagagctagctcagttttactgaaaatttatttcctggaatttttttttttacaagataagataagtgataaaagatatgtttaaatggaggtgatactgcttgtattcagttctttgctaagcccagtggtcgtttaagctaaagcatttaatgccaatggaaagactcatgctgcactaggtgctattgtaacccatgcttggcagtcaagattaactcagttgaaagttcttcacagtcattatccagaccagatccagaattttaaatctgataagacacctcttatgtgaatctgtcctagcaataagtgacattagaattttcaaatatctgccccacatccttcgaaatggcttttaaaacaacaaatacagatgatatattctattttctctggcacaatgagttttccaacattccttctaagttacaaggctttccacttcctttactacttaatgacttctttttttctgactaacattttaaaataagaaattagattgcaaaagaaatattaaacatcaagtaactaaatgtgtctcaatgattttggcaatcacacagacttaacatgcataaaatgttacaggaggaattattcatgttattaaaattcacttccctttcttttgtattcataagcatgcaaatgtgtaggattgtctaccattcttttctacaaggaagagattttaataaaccacttactgtatttctctatggaaatgtaataaacattacctgatgttgataatgtaacaccagttaaacttaatgagtaaaattaatacagacagttcatgaataattttccaaaataacttgcgattgttgttagtatatgtcgccatgtgttcctgtagttgtaggaagtttgtatgtattatcttaggctctgttctcatcattttccattgtgtcatgaaaacacatttaccttttggactttatccctcttccttcctgacctgcaccctaaatgtggctaattccaggttgctgtgaatagaagtttactagattttttttttttttttgagacagtctcactctgtcgacaggctggagtgcagtggcgcgatctcagcttgctgcaatctccacctcccaggctcaagtgattctcctgcctcagcctcccaagtagctgggattacaggcacgcacaactacgcccagctagtttttgtatttttttgtagagatggggtttcaccatgttggccaggctggtctcgaactcctgacctgaagtggtctgccctcctcagcctcccaaagtgttgagattacaggcatgagccactgctcctggctgaaatttactagattctgaagagcacgtgctactcctcctgtttgaaatgccctacctcatgtgcctgatctcatcatccttcacatctcagttcccaagtggcttcctctgggaaagctttgccctagtctccctcaaactaactaaagcttctaacatttagttggttcttgctgtttccacagcattttgcagctgacttctagggaaagcttcccattgtattttcactgtttacctgtcttgttcctcactgcactgtgagcccattgagacataaaactgagtcttattcttcttgatctcttttggcatacagcattaaatagagcattccaggtgcttattaattcttatagaatgaatgaatggttggcatggtcataattctcaatagttgcatagtattttctcctgctgatgatttctttaatcacttgctattcttggatgtttatgcatttaccaaattggtttccagaaatatctcatttatcacaacccaccactatgttaagggcttctgaaggtcatatttctatctggttcctgttattttgcaggctgtaatctgtccctctgtatttcattctagaaacagtgtgcctcagtatacaaaaaatttttgtcttgttagaactaggatatgagtaagcctttgttgctatcactggatgataaaaagaaggttattcaaattcttccataaaatcacaggagtgtaccttgtgtatgaacacagccttctgtgttttcctaaatttccagtgagcgtgagtggttgtccctcccagttaaagaaaagcaaattaaatgcaaaataaaacaatgagaaacaattttgtacttatcacattagcaaagttttttttttttaagtctggtgttgcaaacactggcaacatttaggaggaaacaggcactcatacactgtaggtaggggtacaaattgtgcaacttctttgaaaggaaattcagaactatatcaaaattttaagatacatgccatgtgccccaagaatttatgtctaggaatttatcttagagatacacttgaacattttatacaagggtaaatgtacacatatattcatggctgcatgccttttctgcaaaagaccaaaagtgacctcagtgtccattcacagaggttacttccatacaataaaatactaatctgccatttttaaaaaaattaaggaattctagtttatttctgtatacataaataaaattcatgtgtataatgtttataggtttccatttgtgtaacatataatataatgtaataaataatataatgtataatctaaattataatgtatattatgtatacaatataatgtatacataatctaaattataatgtatattatgtatacaatataatgtatattgtatgcatataatataatgtatatgtatataatgtaatatgtaactgttatatattctcatatgtgtaatatatgctaatatatgtcatatattacacatacatatatgtatatatagactgaaaatatacacaagaagttggtaatggtgctcatctctatgatgggagactaattttcacatatatgtttgtatagttgaaactattttattgtatttttccctgcttttcttgactgtagaaactttgtttttttaacatatttctggatgattttttaatttaatttttttggcaaaaaatacgcatacaaacacacatatatatattttaaactcaaatagtactgcaaagtttctaagggaagacaacagtcttgtcattcccctcttttctcaggctcaaatgctactctccagaagcactcattttaaattttagttgttcttacattcactttcttttgttttctttttttttgagacggagtctcgctcttttgtccaggctggagtgcagtggcgtgatcttggctcactgcaagctccacctcccaggttcaagcgattctcctgcctcagcctctggagtagcttggactacaggagcccgtcaccgcgcctggctaatttttgtatttttagtagagacgggttttcaccatcttagtcaggctggtctcaaactcctgacctgtgatccacctgccttggcctcccaaagtgctgggaatacaggcgtgggccaccgcgccgcggcacatttcattttctttcccggcctcccccagatggagtctcgctgtgttacccaagcaggagtgtacagtggcgtgatctcagtccactgcaacttccgtccaccaggttcaagcaattctcctgcctcagcctcctgagcagctgggattacaggcgaccaccaccatgcccagctaatttttatattttttagtagaggcggtgtttcaccatgttggccaggctcattcactttcatattactaataacaagcttgtttggccatgtcttgatgttttccccttttagacattatctactgaattcctatcagagaggcagatttaactggcttacacatcccactcctgacaccctcccatacaaactcttgctcttactccaatctcaaatcataattagattgcaacttatagccaaatcaattttcagtggacaccttattatgactatggaaatactgtttgcagttaagccatgcagtatagtaacattgcacttcctttctcataaagttttttggatttgtgttgagttaataattgcctttccccctcatttactttgtcttccatgtgcctatcattaattcagttccaaaatgtctcacataaccataaagcacctctcagtatggccagacacaaaattcaactgtttgcatttttttcccatgagacattcccggctgtggactctgtcctcttgctttacgatgaaatgatcactgtcatcatcctgagaattccttttttgttgtacttgctagttctggtggagcacatctgaaaaagagaacactagagaaaacttttttgaggcctaaggtatcacctaggatgccttcaattataaataatagcattctggaatacaaataggatttttattactattattaggtcatctctaactctctgaatagttagcagctcaatgatgtcatcaggacccaggcactttttgtacccttgctgtgccttcatcacaacaatgatgatgtgtccgctttatgtcacaggtggctacagcagctggctaatttcatttgtcagaaactgagtcataccttagctgcacggaagtctcagaaaatgaatatatatcatttacatcttctattgtgagaacaggtctcaagtcaataggaaagaagggattgggggaatagctgttggataggcaacccacagggtctgcacatcatgtgtatttaaaaatgtgtttagtctgcattcatagtttagctgggtatagcattctaggttggaatgcattttttttccttagaattttgaaggccttgtttcaatatatcctagattccagtgttgctgtcagatgcttgatattattctgattctcaatcctttgtatgtaaccagctttccactttctggaagcttttcctctgattctaaaatatcactgtagtgtgccttagtgtaggcatgcattcctttttctttttctctttttttttttttaagatggagtttcacccttgtcacccaggctggagtgcagtggcacaatctcagcttactgcaacctctgcctcccaggttcaagtggttctcctgcctcagcctcccgagtagctgggactacatgcacacaccaccatgcccggctattttttgcatttttagtagagatggggtttcaccatattggccaagctggtcttgaactcctgacctcaggtgatctgctcgccttggcctcccaaagtgatgggattataggcgtgagccaccgtgcccggcctactttctcaatcaaaaagtaatgcagttttttaggatgcatttttttaaaaacagcaacaaaaatatttgaatttggattatctttctcagttacacttacttttatccaactgcaattgacctggggtaagcttggcaacaatgaaacatcttttccaggctattccctttggagtctttcttgttctctggatccctagacttctcttcccaccacttgatgccttgcccaacctatcctcttcacattttctttacaattaaaactgacctaaaaccattgcttaccttttagagctaacgtagctaatctaataaattaattcacaaaatacaatgatgaaccctccttacacaaaacatataggcatttaatcacaatcttcaatatttttatcccaaatgaaagagtaaaaggtgggaatttcacagcggttgatgatgattaactgatccatattttctgtccttcaaatcatattccctaatccagttcctaacagttctgaaacaatgcagaagaaaatcttggctttttaaggaatgcttcattggatagcaatttaaaaatgcacttgtattcaaatctaaacaatccatgacatctgtggggcacctgatcaagaattgctcacattccatcttgtgagtcaaagcacaggattgctgtgcttctctgagtcccagcactgaagacctacacaggcatctttcctatgactcacctaaaatacttaatttctcaaagatgtagacaatcaaatgctggcaggtgattctgtaggctaaactgtctggtcctcagctgtgctgagtgacagtgatatgcataatggtagtttttaaacttttttatactgaactttcagttgttgttttctttaactctaacacctcaaaacaggagagtcatgtgtaaaacaggagggactggggcagctgacatgattggcacaatggatggcccctgtgtcaggtttaccataaagctaatgatacttaaacttcagggactctccaaagtcttatgcctcattttacattattaatttggtaaaaaaaaattttttttgagacagaatctcactctgttgcccagggtggagtgcggtagtgtgatcttggctcactgcaacctccacctcctgggttgtagtgattctcctgcctcagtctcccaagtatcttggactacaggcacaagccaccatgcctggctaatttattttagtagagacagggtttcaccatgttggccaggctggtctcaaactccggacctcaggtgatccatccaccttggcctcccaaagtgctgggattacaggcatgagccaccacgcctggtcaaattttgtaattttttttttcttaaagaactctcctcttcctcagttgtataaacttcaggccccatgaaacctggtttcacacctgataggacccagagcttcacccctccttcctctcctcttcagccctctccaaggagccctagtcctctgtggaacaaaaataaaagacaacctgtgactgggcacagtggctcatgcctacagtcccagcacttttggaggctcaggcaggaggatcacttgaggtcaggagttcaagagcagcctgggcaacatagtgataccctgtctgtacaaaaaaaatttaattgggcatggtggcatgtgcctgtagtagtcccagctatttgggaggttgaagcaggaggattgcttgagcctaaaaggtcaagtctgcaatgggctttgatggtgccactagcctgggcaacagagtaagacactgtcaaaaggaaagggaaggagaggggaggggaggggagaggaaaggaagggagggaagggggaaaggaaagaaaggagaaagaaagaaaacaacaacttgtaacaattcctggactaggaatcaggagagagggtctgacacctgtgcttgctactagccctttgtggtcctcagtcaggtcacttggcctttttcagactccgtttcatcatctgtaaaatgggtgtgtttgacctgatgatcgccaagctccctttgaaaactaagtctttgattctaagtctactggggacactttctacattcccttacaatagcctctattcatgggtttgtctttccccactgaggtgctggaaaaactcaccctctgattttctgggtcctgccaagacttagcccagcccctccctcttcaagcaatgacgtccgtgatggtgataggactgctgtctctcctctccccacaattcactgtctccactcctgctagatgaaagaggaatgacagggtgcagttctatgtgttaacccttctcagaataccttcatttaaaatagaaattaatatttcatctcaatggcataactctttagtggtgaaattttaggcagcagttgcagtcaagtctgaggaagagagatcgtcttgagctcttgcagcaggcagtgtttagaccccctcaagccacaaggggacactgcccattattctagaaccaaaagactgacccagttaaaaggcacaggagccctgtcaacgtgggtgcaaggagactttcacttggaatatcatttacactcacacagcagtggaagttaattgcatggtggaggatggggacttcacctgcttcaccatccatactccactttcccccagtcacagatcctgatattatttgggggcagcagcatgcccagctaaaggaccatgtgtcccagtctcccttcagcgtcatgtggtcatgtgataaggttctgacccatgaggtgtaggcagaatgttacatgagacttccaaaaactccctgaaagtccagaaacacacccttttctttagtcttcaagtcagagatgtgatgatgatggctgctaagtggttgccatcttggatctgaggggactttgcagatggaagtcatttactgaggagggtggaccagaaacataaaaagagcgtggctccctgatgacatcgtggtgccacttcctcagcccagaccacccccactctggacttatttttagtaagaaaataaaatctttatgtgtttaagccactagctctcagttcactgtcactcatagctgaatatattcctggctgaaataaatgagaagactaaactttccaccttttaaagaaagaatatagtgagtaaaaaacagggtaagatctaggagagatgcaaataaccttaaaactcaaccttcctcagcagaaggatataatatatatataatatatataacataaaacataacatatatgttacacatataacatatatgttacacatataacatatatgttacatatatcatatatttatatatataacaaggatacattcatttaaagcccgaatctcaaaagttcagacaatgtattgaaagggaaaataaaacaaaagcactttagtatgagcattggcgattcctgttggtcccccacagggtagaagatgagaggttggtcagtcaggaagtgtcacctctgtgcacaacctggagttgttttggaaggaggagagacgcccagagcttgagcaatgcaagcgtgatccctgctctagggaagcgtgaggtcatctgcacatgctcattcatgctcgctttgctccccgcagtagggactcctagcacctccctcagacccatctttgttttggctgctgtggccataagatctgcacaagcctctgtcacagtgctgaggatagaactggtgagcaagccccagtgctggccctggaggagatgagagctcagtgagccgagagcaaggaaacaagccatcaatccctggtaggacaagtgttcacaagggggaaggcccgtgagaagactgaggaggggccctgactcatttttggaagtcccaggaggcttcttggagaaggtgaccttctccaagaatagagacctggaggatgagcaggagtttctgtcctccccttagtcactgttcagtggcagctgctgtcacatgacagttctttgccccagatccatagagtgaagtaggtagcaatgaggtagttagaagaatacactgctgggctgggcatgttggtgcacgcctataatctcagcactttgggaggccaaggcaggcagatcacctgaggttgggagttcgagaccagcctggccaatatggcgaaaccccatctctactaaaaaatacaaaaacagtcagccaggcatggtggcacatgcctataatcccagctactcgggaggctgaggcaggagaatcacttgaagctgggaggtgggggtcagagtgagccaagatcacgccattgccctccagcctgggtgacagagcgagactctgtctcaaaaaaaagaattagttaattaattaattaattaatttaaaaaaaaagaatacactgtcctctcttttcctttcctggaagtctgaagacagaaccatctcatttgctctggaaggagtcagggccaacatcagggagtgggattaagggccagggaggatgctgagttaggaaatacccacctcaccaccctgggggtcaggcccactggactattcaggcagtgagcagcagtacccatgaccatgagccttcttctcacactcttctccccatgtgacttattttggtaacagtttcattgagatataatttattccttcccgtaggacatagctaaaaaaagagagaaagaggtaatttatataccacacaattcacctatctaaaatgtgcaattcaatggattttagtatattcgtagggttgctcaatgatcaccacaatcaattttaaaacattttcatcgcttcaggaggaaaccccataccctttggctgtcacccctcaatttccccaaccctggcaaccactgatttcctttatctcaatagtttttgcctattcttaacatctcatagaaatggaatcacttacatggtcctttgtcactgtcactgatgtcttccacgcagcagaatgtttttggggctcattcaagctgtgcacactccttcattcctggttatagccaaattatacacacaccacttttcctgtgtctcagactgatgtctgggtcagtcatcaatcctattcgtcaatttattctccaaatgcgtctagagcaaataccatgtgaaacccatggttttatggcccccaaagctcccaatccatcttcttgtctccatctctatcatcaccatcccggtctgccaccgtctgtctctgggaccaaggagctttccaaaagtgaaatgttagccttcaacagtgactgcccgcccccaaggacttcccgtgatcttagaataaagacaaagctacctggcatggctatcaacactctgcccagtctggcacttccctccactctgtttcaacttctctcttttggcttcagctatcctgtcttctctcaaacactgtcacttgccaccttgaggccttggcctggaacaggccttatcgctcacctggttaaggccagtttaccttccaggctgcaggtcagtggtctcttccaggagaaacctttgccaaaggagcctcatcatagctctcataattctcatatcactctgttcctttcccactctgtctcccttctacactggaagctctttgagggtgggcattgtctacttatgctcatcattggtttccctctacctaacagtgcctggattagaaatacagaaaggacatccataccaacatttatagtgtgccctgtaaccagacacttttattgattaatttttttagttttttaaaattttattttaaattccaggatacatgtgcaggacgtgcaggtttgttacataggtaaatgtgtgccatggtggtttgctgcacctgttaacgcatcacttaggtattaagcccagcatgcattcgctatttaccatgatgatctccttcctcctgcccccccaccccaagccccagcactgctgccccaccaccaggccctggtgtgtgttgttcccctctgtgtccatgtgttctctttattcagctcccacttataagtgagaacacccagtgtttggttttctgttcctgcgttagtttgctgaggataatggcttccagctccatccatgtccctgcaaaggacatgatctcgttcctttttatggctgcatagtattccatggtgtatatgtaccacattttctttatccagtctatcattgatgggcatttgggttgattccatgtctttgctattgtgaatagtgctgcagtgaacatatgcacacatgtatctttataatagaatgatttatattccttttggtatatacccagtaatgggattgctgggtcaaatggtatttctagttctaagtctttgaggactcaccacactgtcttccacaatggttgaactaatttacttccccaccaagaatacaaaagtgttcctatctctccacagcctcgccagcatctgttgtttcttgatttgttaacaattaccattctgactggtgtgagatggtatctcattgtggttttcttttgcgtttctctaatggtcagtgatgttgagctgtttttcatgtgtttgttggttgcataaatgtctttttttgaaaattgaccagacacttttataaagactatcttgtgtcatcgttatgataatcctatgtggaagttatcttcagcttcattttaccaatgagataaatgaaactgtggtagtataaataaataacttgtctaaagatactgagtagcagaggaagcattccatcccagacccattgaattctcagatctaagatcctgccaggctgtttctggaatacagagcagaaaattccctcctgttcaagcgctaactagataagtccttcttcacaaatgccaagtaagcacagaaaaagagcaacagggaaaaagtttatgctccaaggaagaagtcaaccccagactgcagggatcgtggtgagattgtatcaggattggaccttggggaaagcttccttatatttgagactcataaaaaaaaaaaaaaaactccccacaggtggtcagtttggttcttactggcttgctggaagtaagttctcatgtttctaaatgcagaccgggtatttcctttggaatgttctcacattgttttatttttgggtgtcaaccttttcattttagtccagcaaagaactccttgttcgtttcctttgggggatttatttttcctcctttttctgaggcggcagtacctctaccaggaaaaactgattaccagtgctgtccccagagttgtcactgaggtgtttccaccgaaagcttctctgtcactttgaggtcacctgagagcatgagagccaggctcactggtgacctcatccctctggccctattccagcagcttagctttgagcttcatcatcacagtgcagcagctgactacttgctaactaacgtgttatgccattgataaccaggaacttcctgactgacgttgaacgggaaaaggatggcggatcagaacccctagaaggaggtcatcttcatattacaaaggacagcccatttagggaagtgactttggtgttgtttaatagattccctttgctctgaagcaccctgggtatgttcttttataatcaaaacagctgatcacttttcttacagagataaatttgctcaaaaataatgcatctatgtatacaatgaaatattattcagccttaaacaggtaggaaattctgacatgtgaatgaaccttgagaacatgatgctaagtaaaacaagccagtcgcaaaaggataaatactgtacaattccacttttgtgaggtccctagaatagttaaattcatagagacagaatgtagaatggtgtttgccagaggctagagcagaggcccccagcccccaggccacagaccagtaccagtctcactcacattactgcctgagctccgcctcctgtcagatcagctgcagcattagattctcacaggaccacaaaccctactgtgaactgcacaggcaagggatctaggttgttcactccttatgagagtgatgatctgtcactgtctcccatcacccccagatgggaccatctagttgcaggaaaacaagctcagggctcccactgattctacattatggtgagctgtataattatttcattatatattacaatgtaataataatagaaacaaagtgcacaataaatgtaatgcacttgaatcatcccaaaaccatcccccaccctggtttgtggaaaaattgtcctccacaaaaccagtccttggtgccaaaaagactggggactgctgggctagagagaggggttagagggagttcgtgtttaatggggacagagttgttgtttgggaagatgaaaaatttctggaggtggatggtggtgatggttgcacaatcatgattgtacttaatgtcattgaactgtatacttaaaaatggttaagatgaggcccagtgcagtggctcacacctgtaatcccagcactttgggaggccaaggcgaatggatcacctgaggtcaggagttcgagaccagcctggccaacatgatgaaacctcgtctctactaaaaatataaaaattagctgggtgtagtggtgggcgcctgtaatcccagctacttgggagactgaggcaggagcttgaacctgggaagtggagattgcagtgagccaagactgcaccattgcactccaccctgggcaacaagagcaaaactccatctcaaattaaaaaataataataataatggttgtgatggtaaattttgtgttgtgtatattttcccacaataaaaaaataatgtgctgaagatgcttctcaaagtcttgcctgctatcctgctacttgttcatcaattgcaatttggcctgccacctaccttcttgaggcttgttcctcaaagtatggtccctggaccaggagcagcagcagttggaagcttgttagacatgcggcatcttggccagatgcgggggctcatggctgcaatcccagcactttgggaggtcgaggctggcagactgcttgagctcaggagttcaagactagcctgggcaacacagcgaaaccccatctctacaacaaatatatatatatatataaaaattagccagatgtggtggcatgtgcctgtaatcccagctacttaggaggctgaggtgggaagatggcttgagagcaggaggcagagattgcagtgagctgagatcaagccactgcactccaacctgggagacagagccagacgctgtctcaaaagaaggaaggaaggaaggaaagaaagaaagaaatgcaaatgacttaggccaggtgtggtggctcatgccactaattccagcactttgggaggccaaggtgggaagagcatttgaggccaggagtttgagaccagcatggtcaacatggtgaaatgttgtctctactaaaaatatcaaaattagctagatgcggtgatgcacacctataatcccagctactcaggaggctgaggcatgagaatcacttaaaccctggaggcagaagttgcagtgagtcaagattgtgccacggccctccagcctgggtgatagagcaatactctgcctcaaaaaaaaaaaaaatgaaaatgatttatatgcaggttaaggtttgtggagggctgttctggatcagtggtgggcaagtctgcaggcacactggaatcacctgtggagttttaaaattactgatttgattggtttagtgtggccaggcatcaggatttacaactgctcacattagaattcaagtaattctagtgtgcagccaaggttgggatcaacagatctggattatcttttcttctaacccttcagtgttttcacacttttctcatctcagtgaacacttatttcctggggcatcatttctgcttgattctttttaatcatttcaattcctttgttaaatttatctgataagattctgaattcattctctgtgtgatcttgaatttctttgagtttcttcaaaacagctattttcaattatccgtctgaaaggtcacatatttctgtctctccaagattagccccggtgccttatttagtttgtttggtgaggtcactttttcctggatggtcttgatgcttgtgtatgtttgttggtgtctaggcatagaagagttagatatttattgtagtctttgcagtttgggtttctttatattcatcattcttaggaaggctttacaggtattctaaaggacttgggtgttgtgatctacatttgtggtcactgcagctgtatctgcattaggtgctaccccaagcccagtaacactacggttcttgcagagttatagaagccttggtgtcttggataagatccagaagaattctctagattaccagacaaagactcttgttctctgcccttattttctcccaaacaaacagtctgtctctctgtgctgagctgcttggagctaggggaggggtgacacaagcacccctgtggccaccaccactgggacggtactgggtcagatcaaaagccagcacagaactgggtcttgcccaaggcttgctgtaaccacgacctacgttcgctcaaggccctagagttctctaatcagctgatggtgaagccagccagccttgtatcattcccttcggggtggcaaatcccctgagtgggtccagagatgctatccaggagctagggcctggagttggaaaccttaggaatctatctggtgctctattctactgcagctaagctagcactgaaaccacaaaaaaaataaaaataaaaaaaaaataaaaaagctcttcccactcttccctcccctttccccaggcagaggagtctctccccgtgtccaccactcaccactcccacaggtgcatagggaaggtgactgactgccaggacaccaccaatgtgcccttaaggcccaagggctcttcagtcagcttgtggtgaatgctgccaggcctgggactcacccttcagggcagtgggcttctctctgggccaggttaggtccagaagtgcagtccaagagccacggcctggaattgaggacccccagaggctgcctggtgctcttctccactgtggcaggcctgatacctaagctgcaggaccaagtcccctttattcttcttttctcaagcagaaggagtctctcctcagagccactacagctgggaatatgctgcgtcacatctgaagccagcacatctcagagtttctcacccggggcccacagcatatcctacctggctaccactgctgattattcagggctcaagggctctttagtcagcaggtgatggatcctgccaggactgggtcctccccttcaaggcagcggattcccttctggcccaggtgtgtctagaaatgtcatccaggagctagtgcctggaataggggcctcccgactctgcccagtgccctatcctgcagctgagctcgtatccaaggtgcaaaacaaagtcatctttactcttccctctcctctattcaagcagaaggaaggagtcactttcattgctgcaagctgtgctgcctgggattgggggagtactcccttagcacccgtgactagtgtctcactaggttgtgtgcccccacagtaccctggctccaagcccagcgcagcactaggacttgcctgggatttgcagcctttgtggcctagacagccttttaagtttatttaggaccccagggccatttagcccatggtggcaaggcttaccaaaactcaaattccagccactggtatgggcaatgtccctctggctaaggctggtttaaatgctccctccataggcaccagctgagttctgccctgtgctggcagcactgagttctaatgcaaagccccagcctctgcactcctcttcccacaagcacacagtttctctctctgcactaagtagccactactagaggatgggagaggggtggcatcagagattcaagactttcctttctaccctcttcagtgcctctgtcagtgatatgaatttaaaactacgtattgtgattgctaacctgatttttggttcttatgaaggtgctctttagtgtagatagttggcaaatgtggcgttcctatgaacagaacaattgctggaggcttctcttcggccatcttgctctgcatccctccttggggcttgcttgcttccttccttccttccttccttccttccttccttccttccttccttccttctttctttcttttgatggagtctcactctgttgccaggctgaaatgcagtggcgcaatctcagatcaccacaacctccgactccctggttcaagcgattctcctgcctcagcctcccaagtagctgggattacaggcacgtgccatcatgcccagctaatttttgtatttttagtagagacagggtttcaccatgttggccaggctggtctcgaactcctgacttcaagggatccgcccgtctcggcctcccagagtgttgcgattacaagcgtgagccaccacaccttgccattagccaccgcgcctggccagttctgtttgaaaagtctgaagttttgtttgaaaagtctcagctaggagtggtggctcatgcctataatcccagaaatttgggagaccaaagcgagaggatcgcttgaatccgagagttccagaccagcctgggcaacatggtgagatcccatctcttaaaataaaataaaataaaataaatagccaggtgtggtagcaagtgcctgtagtcccagctatttgggaggctgaagtggaagaatcacttgagcccaggtgatcaaggctgcagtgagctgtgatcatgctactgcactccagcctgggtgtcagagagagactgtgtctcaaaaaagaaaagtctcatcctcttggtttttttcataatctaaatgcatgcaagagagagacttcttgtgacctcattaattgagcccctcatcagggcatgaaaacatttatattgattcgttttctagataactaaaacttaccacttttgtgacaaaaaaaaaagttcaaaattgtgatcatttggatgaaaatatctaaaatgggcctggcgtggtggctcacgcctgtaatcccagcactttgggaggcccaggtgggtgggtcacctgagatcaggagtttgagacaagcctggccaacaggatgaaaccccatctctactaaaaatacaaaaattagctggacgtggtggtgggtgcctgtaatcccagctacttggaagtctgaggcaggagaatcgcttgaacccaggaagtggaggttgcagtgagccaaaataatgccactgcactccagcctgggagacagtgagactctatctcaaaaaaaaaaaaaaaggaaaatatctaaaatttatttgtgtgtccccaattctcaatagcaggtccatggctcattcaatggctcattcaattattagtgagtatgcttaggtgtcaggattcctgggactcagaaaatcaggacaagtgctgtgatcacagagctgtatcaacagtgctaattaatagagaatatttggtaacagacatgtttaatattagataaggagactgcatctggacactgaggaaatcctgggcaactttagccaagtgaactcattcacctcacttgttatgcctgagaactgagtcctttctccatgaaaacaaatacagaccatctaccatgcgacagcaactgctgaggatctagaagtataatggtgaatgaggaggctcctattcccactgagctgcaccctagtctaagagatgggcaagaaacaaatgaccaaacaggcagaggtttataatctgaggtgttagtaaaagccatgaagagaaataaagcaggatcgagagctactattttaaatcagtgcttctcaaattacccgaggtgaggaccagtttttcttttttcaatctgttttggactttttttttttttttttttttgagagatgaagtctcactctgtcgcccaggcttgagtgcgatggtgcaatcttggctcactgcatcctccgcctccctggtccaagcaattctcttgtctcagcttcccaagtagctgggacgacaggtatgcacagccatgcccagctaatttttgtattttttagtagagatggggtttcaccatgttggccaggctggttttgaactcctgacctctgggtacagagcataatatggttctaaactatttctgtttggctttaaaatcatttataacagagaaaccaaaatcgcaaggtgatagaaatagaagaagaaattttgaagcattggattaagcccaggatattaattttttcacttttctgcaaaaggaagcaagtgatgctgtattttcaaaatgtatctttaatcattcgtcagtaggcagtcccaacaatttctcctgtaaaattacaggtcaatttaagctattttgtgatggaaaaaatagattccagatctaagaatttcctatttgtgtatcttcttttgatggaaaacaaaattcaaaacattttgtcaaattcataagacatgtggtggtaagttttgacagatgtgcaatatcaagattatcacctattttattgataattatggaacatgtatgacaatctataatcatagcatctgaaggaacagtactggcaagtttctaacttctactttttccttttaatcttttgaaaaatatattgtactccttccttgcatggaaatattaagattactcaaaatactgatgatatcaaacaaatcagcaagattgtttttacattatttacatctttaaaaaggtggaaccaaggctgggtgcagtggctcacatctgtaatccaagcactttggggggccgaggcgagaggatcacttgaggtcaggagttcgataccagcctggccgacatggtgaaaccccatctctaccaaaaatacaaattagctgggcatggtgctgtgcgcctgtaatcccagccactggggaagtgagtcaggagaattgccggaacctgggagttggaggttgtagtgatccgagatcgcaccactgcactccagcctggagacagagtgagactccgtctcaaaaaaaaggtggaatcaacctattttttaatctttcagaggcgcagagtttgtttcacagttcaaacattcttgatggatggcctccttttgacaaacatcgtacctcaacatgcagtgttacatataatcagctttcatattgttacataaatataattatcttaattttaacacattagcttttatttaattcacaattcttactataatgctcatcacattgactttttttttgtagtaagatgttatggaggaagcagtatgttggtttatattccagtgtaaaatccttaatctgtgtatctattctagaaagctttcctgtcattgcggctacaccatcagaactcacccagacaggaagcttaaagtgcaaactacacttaaaccaatataatccttcagagttttaaacagctcagagctacttgtgtccataggcaattaagttgaaagaaataattatttatttgatagcatcatcttcaaatcacacatatactttaaaaactgccattggcagccatatgtggtggctcactcctgtaatcccctcattttgggaggccaaggcaggtagattgcttgcgcccaggagtttgagaccagcctggaccacatggcgaaaccctgtttctacaagaaaaaacaaaaaatacaaaaaattagccaggtgtggtggcacacaccttagccctggttactcaggaggctgaggtgggagaagttgaggctgcagtgagccatgagtgcattgctgcattccagcctgggcaacagagcaagaccctgtctcaaaaaaaaaaaaaaaaaaaaaaagactgccattggcaatatgtgtacattagtcaagttgcaaagaaaatactagcttaatttattcagttggttggtttctgtagttcctgaatacactgagctataatatcataggaaaatggtacctgagctaccttctctgtcaaagatttacccatttccaaataaaattttttttttttttttttttgagacagagtcttgctgtcgcccaggctggagtgcagtggcacgatattggctcactgctatctctgcctcccaggttcaagcaattctcctgcctcagcctcccaagtagttgggattacatgcgcccaccaccacacccagctaatttttgtatttttagtagacacggggtttcaccatgttagctgagctggtctcaaactcctgacctcaagtgatccgcccacctcagcctcccaaagtgctgagattacaggcatgagccaccgagcccggcctcaaacatcctttcttcaatcttttactaatgtctcagcaactgtacttttcaatcttagcaacccaaagtgctgcttcataagatacctgcaaattactaatgtttgtaaatgaaatatcaagtgactgcttccatcagctttttaatttgttagtctttccttaagaggatttttttttcgttttaaaaagagatgaggtctcattatgtttcccaggctgctctcaaactcctgcgttcaggtgatcctcccgcttctgcctcccaaagtgctaggatcacaggagtgagccaccgcacccagcaaaaggattattttggtattgaacttttcacgctttctatgtaaatgctgcttaagttttgatggtttcaaagcataattagccagtacagctctataaataacacatcatagtttttagcaatttgccatcaatgatcgctacaaacccaacattaatacataagtgaatatatatctgagtaaattagtatatatgattttgcttttatgctattggaaataacatctgttgttactatttggttgactatcactgctatttttggaaaaaaacaagtcttttcttgacaaaaatagtccagtaaatcttgtgtcaccatcagtaaattaaggtaaaaaatacagaaaaccaggcacagtggctcacacctgtagtcccaacactttgggaggccgagacgggcggatcacctgatgccaggagtttgagaccagcctgctcaacatggcgaaaccccgtctctactaaaaacacaaaaattagccgggcgtggtggcctgtgcccgtaatcccagctactcgggaggctgaggcaggagaatcacttgaaccagggagtcggaggttgcagttagccaagattgtgccactgcactccagcctggacgagagtgagatttcatctcaaaaaaaaaaaaaaaaagcaaaaacaaaatacagaatacaaaattgtctttacaactaataatgctaaactataaattgaaaggcaagcctaattaagggctaaaattacgataatgtaataaattatgaaaatgtatgtgtggtcctaacatgcacgactaggatgtagtgcactctacatgactcagcacctgaattcaaagccccccaaactcatctataccccggtcagtgagacaagtcactgtcttggatattgcagcaaattctagatgtgcaccttcaaaatttctgggctcaactcatggccaaatggcagcaaactgttcacagacaaactccggtctgtttgcctcacttggagtagcaccgttttaaaatggcagggattgaatcttgatagaggtgacatttgagcagaaacttgaaagaagggaggctacccgtcttattcatatttgggggaaggcagtgtaggtagtagggccagcaggtgtaaacttcttcctcaggcagaaacatgcttgtgtgctttagaagtagccaccggggcagcgtggtggccgcagagtggagaaggggcagggccacgtgggatgaggttggagacagtgggcaggggctagatgacactggctttgtagtcaagataacaacttttgggccaggcgcggtggctcacgcctgtaatcccagcacattgggaggccaaggtgggtggatcacctgaggtcaggagttcgaaaccagcctgcccaacatggtgaaaccctgtctctactaaaaatacaaaaattagccgggcatggtggcacatgcctgtaatcccagctacttgggaggccaagccacgagaatcgcttgaacccaggaggcagaggttgcagtgaaccgagatagtgccattgcactctagcctgggcaacagagtgagactctctctcaaaaacaacaaaaaaaccccttttgattttgctcggagtgggggatttgagatggggagtgacatgttcaggtaagtaatttactcccaaattaaacttcccaggattacccacaattcccctgcatatggcaaatcttgcagtagatcaggagggtctagggtcaagaggatgaagcaaacgccactgaagcggctacgttgtctggggtataaacccggggttcggccgggcatggtggctcacacctgtaatcccagcactttgggaggccaaagcgagtggatcacctaaggttgggagtttgagaccagcctgaccaacatggagaaactccgtctctactaaaaatacaaaattagcctggtgtggcggcgcatgcctgtattcccagctacttgtgaggctgaggcaagagaatcacttgaacttggaaggctgaggctgcggtgagccgagattgcaccattgaactccaacctgggaaacaagagcgaaattccatctcaaacaaaacaaaacaaaacaaaaaaacccggggttcattgtcgggtaccagagtaatttaggacacagacacacaggaggagtttaggggtggaggtttaacagttagaagagaagagaaagaaaaacagcttcctcttaaaggaagtgtgtctggagttggttcctgccagtgggtttgtggtctcgctgacttcaagaatggagccatggacctttgcagtgttagaactcttgaagatggcacggacccaaagagtgaacagcagcaagatttattgtgaagagctaaagaacaaagcatccacagcgttgatggggacccgaggcgggttactgctgctggctggggggtggccagcttttattcccttatttgtcccctcccatgttctgtttctgtcctgtcagagtgcccttttttcaatcctccccgcgattgcctacttttagactcctgccgatggttgcattttacagagcactgattggtgcattttacaatcctcttgctcactacagagtgctgattggtgcatttttacagagcactgattggtgtattttacaatcctcttactagctacagaatgctgattggtgcattttacaatcctcttctaagacagaaaagttctccaagtccccactcgacccaggaagtccagctggcttcacctctcagaaggagtctctgagcagaaaggaccagctggtggagaacgcaccgagttttatagtccagtttgaggaggtgttgtctgatttactaggcctcacagattggttccatcatgtatgacatttacaaagctctctgggaaggcttgtcgccctaccctaatcttcttatgcaaatggactttccagttgatgggggccatattatctgcttcttaccgtacacgtggctggcagagaaggcaagatggagccaccatcttgaaaaggtctagtccttagttcctgctggcattcatctgtgcagcaagctgccagcttgcttgtctatgtctgcagctcaacttttatcagctgctctttgttagaaaattatttggggctgcttttcattaaaaggaaagccctaccaaggactcccatgcccttgctatctccctaagtaattcctttttacctcctatatcaccacaagccagctttcctgggagtcccctagtttctctccaggccctaggtcacttcctatcaccactgaatctgtcagcatctttttggtgcactcaggcctcctggctctcctcctcagtatagccttgaattaatcaccaacttatcacatagtgaacagatgtagccttttccaaatcactcagggtcttcattctgaacccaaatcaccactctgtgctttaaaatatctctcccttgcagtttggtgtgggtgtaggactacattctggccaatggagcttgagcagaagtgatacatgcaactttcaagtcatgccccgtgcccgttcttttctttctgcaggagggaatacagatgaattggcaggatcaggagcagccatgttgcaccaagagaagatgaaaaaagcatatgttgcagattgcaaagtaactaggtaagcatttgagtccctaaaactattcctggtatgactggtagcggcatactagcttggacttttttgtgtcagagaaataaaccttcatctcacttaaatcagtattatttggggccactctctctgtagtaggagtgaaactagtatcctaactaatttaactgtcaaaagaaaaaaaaatatgaggcgagaaaataaggaatcaagaaacaaaagtcaagttttactcacttcatagcttggctcaaaagcaactttaaatatgtgagaaatgcaacaaatgataatcatgcatacagagaaattcctcaagtgacaaatgcttttactttcatttcctttcttgaaaattgacagagtaagattcagatgcatgtactgacactcacgtcagtaacatcggctcaggttagactttggtcgtcttatccttcgactacctaagggactcatggccagtatattttacaacccccagtgccagttactgaattctcacctgagaatgaattccctaagtctgtaatgtttcatcatcttgcaacacagataagcctgtgtttagagcaggcttttccatatgagtccctcctctttcacactggggctgagtagaaggtgattgacctgcctgagactttatcagtttggagttcatgttccatgtggtgttggagggagcaatggaggctgtgaaatcagacatcctgctttttgacagggttgtttgatgactcacccaagccattttttattctcggtgcatattctagtttcccttctcccgacagtagcctgatgcacctgtgcttgcactgtccttaagcctgttgctattgttatgtggtgtcactgagcccaacactgcgtgcgtgtgtgtgtgtgtgtgtgtgtgtgtgtgtgttgaaaggggtaggaaagtgaggatgattttcaaccattaaacccttaaggggccatcttctgaagcctggcatcatcatttttgttctcaagaacatttaagtcaaaaataacaaggttccttttgctcatcttcaaattattttacttgtttgatccaactgctaactagaaggtgaattctttctgctgtcatttcataattctagtgtattaaaaagagatgggggctgggcacggtggctcatgcctgtaatcccagcactttgggaggtcaaggtgggaggatcacttgaggccaggagttcaagaccagcctgagcaacatagcaaggcctcctacaaaaaattttaaaaattagctgggcatggtgacacccacctgtagtcccagctgcttgggaggctgaggcaggaggattgcttgagcccaggagtttaaggttgcaatgagcttcaagtttttataccttcaatcataccatttgtggcttaggaacccctaatatattacatggagggtaatgtagacaccaagaaaatgattgaaaacaatttatgcctaaatacatttgtattcttctttagagaaacctagtagacaaactaaaagctactaagcaaataaatcaaggtactgtattttacaaaatgactcaatttatgcatcatttaaagagtgtggatcccttgggaactttaaacatggttgcattagttaaacagttgcttcattcagatccctctaggaacttgggcagcacaagggaaggggggcctctgttcctactgtgtggtcctggtgatctgtgtaggtatcttcttttaccgggttaagtgataaaaacggtgtcttgtgctcttttatccaagtccaaggagcatctttgtgggtgtggggttgcaattatacctttcctccctgggctgaatccacaaagaagaagagaaaaataacatttctggagacctggccaagccctggaataaaatggttgcctgagagaaactgcaagtttgggaggcggggactcttttcattgtaaccaagagtggagtcctccatttctttttcttttttctttttctttttttttttttttttttttttttgagacggagtctcactctgtcgcctaggctggagtgcaatggctcaatctcggctctctgcaacgtctgcctcctgggttcaagctattctcctgcctcagcctctcaagtagctgggattacaggcgcttgccaccaggcccagctaattttttgtatttttagtagagataaggtttcaccatgttggccaggctggtctcgaactcttgacatcaggtgacccacccaccttggcctcccaaagtgctgggattacaggtgtgagccaccgcgcccggcctcctccatttcttttactttcctttagtcaataatggagacagtgaaggcataaaagtgttcatgctaaagaccattttgaaaatccagccacttcctgtctgttacactccagctgcctatgtcctcatcgtgtaatgggagggtcactctagaagaggaatgggccaccgactgtctaatgtgaccatcctcctgctgaacttggggaaaatgtcactttttgctctgaacccagacctaacctctggatcttgctctatgccatgctccagaaagccaccactatcaatgtgagttgccacaaaaattcaattttttgtttaatagacttaggatcttcagtgaaacttatggccatccccagtggtcacttccatctctaacatctcacgactttatgaaaataaaacaaccagctatcatcagggagagaacacagagttaggagttagtggataagggtgagggtcatgggtgagttacttcccttctcaagccccctactctctccttcagatctacatgttactgtctcaggccaggttccctgaccatcctgtttgcagtgacaactgttgccccccacctctaagtactccctaccccacttcccgttttatatctgatcattagcatttgtgatggttaattttatgtttcatcttgactgggtcatggggttcccagatacttggcaaaacgtcatttccaattctgtctatgagtggatcaccctcctcaatgggctgttgagggctttaaggcagaggaagggagaatttggccttttttttttggagacagagtctcactctgtcacccgggctggagtgcagtggtgcgatcttaactcactgcaacctctgcctcccaggttcaagcgattctcccgcctcagcctcccaaatagctgggattacaggcacatgccaccatgcccagctaatttttgtatttttagtagagatggggtttcaccatattggccaggctggtctcaaactcctgagctcaagtgatccacttgcctcggccccctaaagtgctgggattacaggcgtgagccacctcgcccagccctgaatttggtccttcttttctgccagatgacttgagctggaatatcactctctccttccctcagactgcagtttacatcatcagctcccctggttctcaggcctttggactcagattgaatgatacccctggctttccccagctgccagcttgcagatggcagatggtgggacttctcggcctccacaatcacataagccaattccttatgataactctccttctctttctctcctctcccctctctattttgagctgattattttgggaaactgcaaccacaggagaagctctgaaaacagagtggaagttaccttatcatccacattaccccaggaggacaggatgactctaagtcactggagacagttatcctttattgatggagaaggcactgacttaaatctccataacaaatcttactcttatttgccagtttttcctgagcataatcaactttccctacacccttctttttgtttcagcagacatggcatttaagtgtgagttcaaagccacctctttgaaatttaccaatttctctgggtatctccctgtatactacacgaggtatacatgttaataatcttctgtttatttgtctctttttaatctgttttttgttacagtggcccatcccaactaagaattatgaaagattgagagaaaattatctatttccctacatttatagtaatgtaaatagcatagccactctggaaaatatcagtttcttaaaaagctaaacacttggccaggcacagtggctcacatctgtaatcctaacaccttgggaggccaaggcgggcagatcacctgaggtcaggggtttgagaccaggctggccaacatgtcaaaaccccgtcactactaaaaaatacaaaaattagctgggagtgatggcaggcgccaataatcccagccattcaggaggctgaggcaggagaatggcttgaacctcggaggcggaggttgcagggggcaaagatcgcgtcactgcacttcagcctgggcggcagagcaagactctgtctcaaaaaaaaaaaaaaaaaaaataggccaggcacagtggctcaagcctgtaatcccagcactttgggaggccgaggtgggcagatcacgaggtcaggagatcgagaccatcctggctaacacggtgaaaccccctctctactaaaaatacaaaaaatcagccgggcgcagtggcaggcgcctatagtcccagctacttgggaggctgaggcaggagaatggcatgaacccgggaggcggagcttgcagtgagccgagattgcgccactgcactccagcctaggcgacagagcgagactccgtctcaaaagaaaaaaaaaaattctgatccccgaatgctcagggagactgatttgagtaataatgaaactctggtctcccacacagacagctctgcatgaatgactctttctctgtagaaattcccctatcttgataaaacagctctgtctaggcagtgagcagggtgaacccgctgggcagttacagcatgaggcagccttgtagtgatggcacagttgtgtatctcgattgtgttggtggttacaggaagctacactcgtaataagattgtatagaagtacacacgtgtgtgcttataaaaacaatgaaatctgaatcagctctgtggagcatttcaatgtcaatttcctgattttgattttgtactgtaattattcaagatgttaccaccactgaaggaggctaggtatagggtacactgggcctccctgtacactttctttgaaccttctggtgactctatcattatttcaaaatgaaaagtcaaaaaagaaattgtagttgggctctcaagcttagcgtgtggtcagtggggaaccacacgggttcaacatgcgcatcgagaagtgttatttctgttcggggcccatctaccctggctatgacatgttgttcatccacaacgattgcaaagtgttcggattttgtaaatctaaatgtcataaacactttaaaaagaagtgcaatcctcgcaaagttaggcggaccaaaccattccagaaagcagctggtaaagagcttacagtagataattcatttgaatttgacaaacatagaaatgaacttatcaaataccagcgagagctatggaataaaactattgatgcaatgaagagagttgaagagatcaaacagaaacaccaagctaaatttataatgaacagattgaagaaaaataaagagctacagaaagttcaggatatcaaagaagtcaagcaaagcatccatcttacccaagcccgtcttgcaggcaaagggaaggagttggaagagaaaatggtacagcagttacaacaggatgtggacatgaagatgcttcttaaacatttctgtaaccatttattttatggacatttgaaaatgccctttggagacttggaactgctaaattattagtttattttttacataagttcatttaaatgaaaagtgattaaaatatatctctcctacactgccatctacaaaacacaagatattacggatgttagattgcatctcagtattaaatcttcactgatatgtgtacttatgtaaatcacgaaaattctacttataactgtagaagtgaattgtggacgtaaaatggttatgtcatctggataatggactagacagcatttgtataatcactaatggcaaaaaatcatggctagtgatgtataaaataaaatattctttgcagtaaaatattcactttattaatgttatagaaggggggagacaacaaggaactaacaatttgtatgacggtgtcaaatattttgattttagtatttcctgttttggtttatttgcatcttagaagagcataatgacattgtttgatgaagcctaattatgctggactgtttcaacttggtttaacctttctgataggtagttgtggatgtttgggatgagaactgaataatctttgcctggagtgacactacactctagaatttccactttggagaatactcagttctaacttctgattcctggtagaaaaaactttatttttctagcctagcaatgatctagaagcagaggaatcctagtgccttttaaaagttattatgtggttttctgttaaaaagctcctgtttttggaaagtagaatttatggatacaacatctgctcattatttgcacataaaataaaaccatttaaaaagaaaaaaattatagttggacataaaacaatgtttaaatttaaaattacctcaggatatagacatgcatggaactaatattttatacataatcttaacttgcttttgtcagtgtatctacttgtaaatgtgtctcaccattcggttccctgtgttctgttgctgaatatggtgttatagcacttctggtatgatagccgtggactgttctctgattttctccattttttgctaatgatgtgtaactatgacatgtggacagtacccggattgcctggtttgatcactatggctacttatgtaagcatctcatggcaaatcttgtcagagcacatatagattctgtgaatctgcatggtcagagtaagcttgctctctttgggtggctggagggttatgaatatttttcacaactgtcacttcctgaacttgacctttggtatactttccagatttgctaatgcatctgctatgcttgaggcatggctttaaaataatataactttttcggccaggtgcggtggctcatgcctctaatcccagcactttgggaggctgagacaggcggatcacttgaggtcaggacttcaacaccagcctggccaacatggcgaaaccctgtctctacaaaaaatacaaaaattagcctggcatggtggtgcatgcctgtaatcccagctactcgggaggctgaggcacgagaattacttgaacccgggagatcatgccacttcactccagcctgggcaacagagcaagactgtctcaaaaaaaaaaaaaaaaaattgggccaggtgcagtggctcacgcctataatctcaacagtttggtggactgaggcagctggttcatttgagctcaggagttggagatcagcctgaccaacatgggtgaaaccccgtctctactaaaaatacaaaaattagccaggcgtggtggtgcatgcctataatcccaactacttgggaggctgaggcacgagaatctcttgaacccaggaggcgaaggttgcagtgagctgagatcgcaccactaaacttcagcctgggtgacagagtgagactccatctcaaaaaaaatttatatatatatatataaagattatatatataaaatattatgtatataatatatatataactttctcaaagcaaacgataccattttgatctcctattatgtactagttgttacatatgttatcttatttagaacttatactaatctagtgaaatatgtgtttctttccttgtagaacataaacaagagaaattatttatctgaataaatgttgttcctaagcaccgttattccagcaatgctgttgtgcttcacagccctgttaaacgtgtcttttaggcttgttttctgactctgtagcacatccttttgactgcactcagttgtggaaaattttgatctttttaagtgtaggcatctgtagtcccagctatttgggaagctctgctgggaggatcccttgagcccaggaggtagagggtacagtgagctatgatcgtgccattgcactccagcctgggtgacagagcatgaccctgtctcaacagcgtctcaacaaaacaacaacaacaacgaaaccaaaccagccaaccaaacaaaaataataaagtttagaatttgtctacctacttacctacctacctgtatctatcatcaaaagtaattcagcacaaattaaaataaggaagtatttttaacttacaggttatagaatgcatttccaatgccaccaaagatgcagagaaccctctgtattgctggagaaagtgtgaattgctactactttttggaaagcatgttgacaatatattatgtccacagcctttaaaaatgttcacaccttttaatgagtcattctacttttaggcatgtatgatatattttgaaaactttgtaacaattgacatccactgcagccacagtctaatggagggaaacggaaacccagtccaccacctacacaatctattccaaccccaatttaccataaggttttacttctgttatgactttttgcatgcattttttttaacacgttggctttcttgggagggtaaagttttttcaagaactaagtgtattttcaagaacccagcacataatagatgctctgaataaattttattcaccaattttattcactggcttaccacgagccagtcctgtacagacattaatttatttcaagacaaccctataaagtaggcttttctttcatattttataggtgaggaaacttgaggcagagagagaataagtaattagcccaaggtcatacagctagtaagaagtggggtaaggtgggaagccaggcaacctctcctgagctctaggctcttaactgcctctccagtgtgagcagacagtcacaaaatgtgccaggactgcaccagttgatatacatgttaattaaataaacatgaacccaggacgacactgataaataatcatgagaaaattagagcattctcttagtgaaacattatataatcattgacatcatgctttcaaaacttacacattagtctggataaatgtttttaacactaagcaaaaatcaggagacagaagtgtatgtgcagcatggttatacctaacacaaaatgactggaaagaaacacatcaaaagtgtcaagaagctgcaaatcagatgggcattcattcatctctccttttcactgttaatttccattttcctttaatcagcctattagtttgctactgctgctgtaacaaagttccacaaactgggtgacttaaaacaacagaaatttattctctcacaggagcccagaaatctgaaattgaagtttggataggattggttccttctggaggctgttggggagaatctgttcttgcctctcttagcttctggtggtggctgtcatccttggggtttcctggcttgtagttgtgttcctgcaatctctgctgctgtcttcacacgcccttcttccctgagcatcttcatatggccttcttgtaaggagtaagtcattggatttgggttcaaatctaacccagtataacctcatcttaactcattattctgcaaagatcctttcaccaaataaggtcacattccgaggttctgggtacacataaattttgaggggatactacttaccccagtataatgagcaatttttttctattattttatattggaaaaatgtaaacattaagaaaatagaagcttgagcctaacttctatgaagttaggtggatgattaaacagaatcagaatagttgtaactaagtgatggtacagctaaaacactttttccaacatggtcacagacataaagcagcatggcagcttagtacaaatactagatctagaaacttcagcctgggttagattcctgcctccccacctgccttgtgtgcctttgggtgaagggctcaaacattctgaaacttgtcttccactcctgtacagaaagaaagctatgggtattttagacttcaactgtttctagccagacaactggaccttccaagaggtccagcataaatcatttccatggggaagtaaactttttcctgtctttttcctctcactggggctggagagatgggagaaaggagtaaaaaatattttaaagccttgcatgttcccctgggaggccagggtgcaagaagagctcatgaatggatatttggctgaggtgtgacctggagtgttttgcataatgaagcaaggctggttgagctggcagagatccaaggaagggggctggagggatgagggagtctgtaatgggagtgaggagcaggaggtcacagccacgtggcagaagccttgcagcctgtggaggaaagcccacctaggggtgaaggtttgccaagaaattctcaggactgaaggagaaggtgcgcactgttcagcattaggctgtttgcccaggagtgccatcgcattccccagtgtgagaacggccacctcttggtcgttttctcaacctttggtgaacacttatgacatcgtggggagagatggagaaaaggactttgtgttctcatctggggcgtcatgctggggcacccgaacacagaacccatgagtgagccttgaaggggccaactgagccagaggaggttggaagagctgcgccactcctgtcccactgcaggtgggatagagttcccgctaatttcatttacatttgtacctcaaagcacgaagtggtttagctgacttctgctcttcatgaagggcccagctcacatcctttagtaataattcaaacattctgacttgcactgggcagcatgtttatcataaatgcaaggactgctactttggtgtaggaaattatttaaacgtgtaaactctcatataccaatttgcaaatcaaactcttttcaaggctttatttcaatgtcgttgttagcttttttgacttttctcattttcccactagtttgcttgattgcacattatagaaaattcaccattctcattcattctgatcccacatttagacttctctttcaaggacttgaaagaatttataaatatttgcaatacaggatgcaaattaatccttatacacacttggaaggtaccctgcaatatctttccccatctatcactcacccactgtttattgccctctgaacaatgtccagcctagttcctttcttatttcgttacatacataaaattgcttcccatccacaatctctccttagaaatgctgccctttggccgggcacgatggctcatgcctgtaatccctgtgctttgggaggccaagtagggccgatcacctgagttcaggagttcgagaccagcctgaccaacatagagaaaccccatctctacaaaaaatacaaaattacccaggcatggtggcgcatgcctgtaatcccagctactcgggaggctgaggcaggggaatcacttgaaaccaggaggcagaggttgtggtgagccgagatcgtgccattgtactccagcctgggaaacaagagtgaaactccatctcaaaaaaaaaaaagaaaaagaaaaagaaaaaaaaagaaatgccgcccttcccacagctaccctacttaccacgttactgcagactgcaccaccagtgaatgtgacccaagttgcagtaaatgaaatatctcccagaaatttggagttgggacatagggactgagcaacttatcatctctgaaggaccagactggagagaaaggggagagagacagagagagagagagagagagagagagagagagagagagaaactgcctggagttgctactcccagttctcaagttcagttgggtttcttaagatttatctctttataataaatctccctttacatgaattagcatgagtgggttttagttaattaattatactaattttttttttttttgagacggagtttcactcttgttgcccagactggagtgcaatggcacgatctcgcctcactgcaacctccacctcccgggttcaagcaaattctcctacctcagcctcccaagtagctgggattataggcatgcgccaccatgcccagctaatttttgtatttttagtagagatggggttccatcatgttggccaggctggtctcaaactcctgacatcatgtgatccacccgctttggcctcccaaagcgctgggattataggcgtgagccactgcgtccggccaaccaaataattcttcagtcagattttcagagtgagtcttcaaaacaaagtttataaaatcagtgagtacatattaaccatattaggagctaatctcattcatttttctttccttttctatttcctcttttaaaaatgtgaaatgtatcatccatacagaagagtgagcaaaatttacatatatggtttaaagcagcccctggttgaaaccatacgtatgtgttttatgcactcttctaggcctgatggtaaatatttttagctttgcaggatatatagtctctgccaaaactgctctagactgctattacagcatggaagcagctatacgaaatacgtaatggatgaacatggctgtgttccaacagaactttatttataaaaacagatactgggctgatttggcccacaggtcataatttgctgatccctggcttgaggaaaaattttaaagcaaaggtctgtataaccaccactcaagttaagacatagacacagacacatccctgtgtgtccctcctagatgagaacacttcagtcctctctagactgggcccctatcctgacacttgggatgaacattttcttgagtctttttataactttgccgtgtatgtatgcatttctaaacagtatagcttattttgccttattttttgaaaagagaaccgtatttaatgcatgcatccttttttctcctcctcttccttcttggcttgcttttttatgtttgtgaaattcacacacaagtagctgtaatttgccttattactgtacagtttttcattgtatataagacaccagaatgtttgtttgtttcttaaatatattccactgctgattaaaatttgggctgttttcagttggggagcaataatgaacaatgtagccatgaatgtttcaaatgtcctctgaaacctaaaacctattagtcaccaccttgttatttggcagaatatagaagctaacagataagggagccttggtgacacagtgaataaagattagcccccagccattcagagcagagaggagagggtggagagtaactctcaagggcagtccaagaatatgcagcactcatgtctcaacgactttcaaaggattgaaagaagtcacagcatcttctctcaccaaatgcaatttaatagaaatcaacaataaatttatatagaaaattctcaggctgggcgcgatggcttatgcctgtaatcccagcactttgggaggccaaggcaggcagatcacttgaggtcaggagttcgagaccagcctggccaacatggtgaaaccctgtctctactaaaaatacaaaattagctgggtgtggtggtgctcacctgtagtcccagctacccaggagaccgaggcaggagaactgcttgaacctgggaggcagaggttgcagtgagccaaaattgtgccattttactccagcctgggcaacagagcgagactacatctcaaaaaagaaaaaaaagagagagaaaattctcatggctgggcatggtggctcacatctgtaatcccagcactttgggaggccgaggcaggtggatcacttgagcccaggagttcaagaccagcctaggcaacatggtgaaaacccatctctatttaaaatttttaaaaaagaaggagaaaattctcatatgttcaaaaatcaagaaattgttttaagaaccccacagattaaagaataagtcctactgaaaatttaaaaaaaatttttgaatggtaatgaaataccacatatttaaatttgggggtacaactgaagtagaaaatagatgaaaatttgtagcttcatatttgcatgtaatacacagtttaaaatagactaagatagtgtattagtttgttttcatgctgctgataaagacatacctgagactgggcaatttacgaaagaaagaggttgattggacttacagttccacatggctggggaggcctcaagatcatggcagaaggcaaggaggagcaagtcacatcttatgtggatggcagcaggcaaagagagagcttatgcagggaaactctcatttttaaaaccatcagatcttgtgagacccattcactatcatgagaacagcacgagaaagtcccgtcctcataattcaatcatctctcactgggtccctcccacaacaagtgggaattatgggagctacaagatgagatttggatggggtcacagagccaaaccatatcagacagaaatgatgaaaggctgaaaattaatgagctgagtatctatctaaagaacttaaagagccacaaaataagcccaaagaatataaaataagtaaatatatagtagtaataagaaagtaagtagaaagtaagtagtagaaagataagaatagaaaacaatgaaatagaaaacaaatatactgctgggtgcggtggctcacgcctgtaatcccaacactttgggaggctgaaggccaggagttcaagaccagcctggacaacatagagagacctcacctctatttaaaaaaaaaaaaaaaaaaattagcctggtgtggtggcatgtgcctgtagtcccagctatttgggaggctgaggcgagaggattgcttgagcccaggaggtggaggctgcagtgagccatgattgtgccactgcactccagccgaagtgacagagggagatcctctctcgaaaagaaaagaaaacaagcatgcaatagagaggaatgacacaatcataaggtgattccttcatgagaataataagatggcaaaactctggaaagagagtgagaacacatataatgttatgaacgaagaaagaacattacaagccaggcacagtggctcacgcctgcaatcccagtacgttgggaagccaaagtgggcagattgcttgaggccaggagtttgagacaagcctgagcaacatagcaagactccatctctacaaaaaaaatacaaaaattaggtgggtattgtggcatgcacctgtggtcctagctacttgggaggctgaggtggaaggattgcttaagcccaggaggttaaggctgcagtgagccatgatcacaccactgcattccagcctgggtgactgagcaagattctatctcaaaaaaaaaaaaaaaaagaaaaaggaaaaggaacattacttaagcgccacagacattaaaaagatatgagtaagttgtgaacaactttttgccagttcatttgaaaaattaagttaaatggacaatttcatatagacatatattatataggaatctctatcataataagtgagtacaaagtgagtaattgtaatgctcagatctggggaggatggaatctcagggaggggagctgcatttccactgatatttggtgatctaggagcgggtgcctgagaggctgatcaatgcttttggacaaccttgcagggattgcagggagaggtgcactggcatcctggagtccagggctgccaagaaggtaaggccccgatgagcaacttttgctttgtgttagaaccctgaagggctacacgctatgaataggggtgaactagaatataacacactattgttgggactgcagctcaacctcaaatcttcccagtctctcaaattggattgctagtgttccaggctcctggcaggggcaaatttctctagagaaagatggcatcaacctaggcatcaaattatttctaaaaataattttgcaaatataaagtccagcacagaataaaaaacaacaaggcagccaggcacagtggctcatgcctgtaatcccagcgctttggggggccgaggcaggtgatcacttgatgtcaggagttcgagaccagcctggccaacatggtgaaaccctgcctctattaaaaatacaaaaaataggcgtgctggcgcaggcttataatcccagttactcgagagactgaggcaggcgaattgcttaaacctgggaggtggagattgcagtgagccaagatcccaccactgcactccagcctgggctacagagtgagactccatctaaaaaaagaaaataaaagagaagaaaaaagacagccaggccacatgtggagacaaaatactatatgagcaaaaaagagcagaactagcaaaaattgaaacagacctaaaggaactccagatactggagttagcagacaagacttgcttatgatattcaagattaaaagcaagacataatttcagcagagatctgaaaactacaaaaaagacccactacaagaaaggattatttcaggctaatctcactcatgaaaatagttgtaaaaatcctatgcaaaatatttacaaatagaatccaacaatatgcaaataggcaataagtaatgatcaagttgggtgtttttttttccccaggaaaagaagatttatttagcactcaaaaatcaaccattgtaattatctacattaccagaacagaggagaaaaaaatgtaaaatcacgtcaaaagatgtagaaaaaaatttgattacattcggtatccattcggtatccatttgtcatcaatggaaaaaataaaaagaaacttccttatctgataatgagcatctacaaaaagcctattgtgaacaccataattaatagttaaatgttgaaaattttcttttgatttggggaatagggcaagtatgttggctaagtcctcttggaagcagacgtcaagatggatttagaagtgcaatggatttattggaggcaattcccatgaaagctcaagaggggaggcagcaagagagggcagagaaagcttcagacctaaatgctgatctgacccctgtgcaaggagaagggaaggaagaggataaggtaggaagaacagcaaattacactgcagctctgagaatatcttgactagccgaatggggagctgtggctcaaagatttcccatggaggagtcccacaccggccaaaaagatgagtccttgcatcactgccaagcccattaattgattgaaggctgctctggaaatctatggcccagctcaaaagctgaagaagatgctgaaggtgcctgcagccagaagctgtgagccaactgcactctccaaggcaggttttttttttttttttttttttttgagatggagtctcactctcacccaggctggagtgcagtggcatgatctcgactcactgcaacctgcacctcccaggttcaagcaattcttctgcctcagcctctctagtagctgggactacaggcgtgtgctaccacgcatggctaatttttgtattttttgtagaaatggggtttcaccatgttggccaggctggtctcaaactcctgagctcaggtgatccaactgccccagcttcccaaaatgctggaattacaggcatgagccaccgcacctggcttctgttttgaaggaagatatgagagactcacctccacatctgccacaagaatattcaatatcaccacttctattcaatattgtactagaggtcccagtcagggaataaagaatagaaaaatacagagaataaatttagaaatttagaaagaaacactactgatgttatttgaagatttagaaagaaatgtatacatttagaaactctactgacgttatttgaaagttatatggctgtgtatatacaatattctaaaggaatatataaataagcatttagaataagtgagttaagcaattttgttgcatataatgtctacgtaaaaaggcaactgtggcctagtgcagtggctcacgcctgtaatcccagcactttgggaggccaacgtgggaggatcacaaggtcaggagttcgagacgagcctgaccaacatggtgaaaccctgtctctactaaaaataaaaaaattaaccgggcatggtgccacacacctgtaatcccagctactcaggaggctgaggcaggagaatcgcttgaacctgggaggcggaggttgcagtgagccaagatggcaccactgcactccagcctgggcaacagagtgagactccgtcaaaaaaaaaagtcacttgcatccttaaatagcagtagcatagaaaaataaggtatcaggccaagtgcactggttcatgcctataattccagcactttgggaggttgaggcaggaggatggcttgaccccaggagatcaagaccaacctaagctaggcaacataggtaagaccctgtctcaacaaaaaataaaaatatcgaccaggcatggtggcacatgcctgtagtcccagctacttagaaggctgaggtggaaggattgcttgagcccaggaggtcgaggttgaaataagccatgctggtaccacttcactccagccttggtgacagagagagaccctgtctaaaacaaacaaacaaaaatcaggtttcaagaaatacaatttaaaaatgatgcgcaagagctttacacagagaactgtaatgcattattaagagaaatacacacacccactcccgcaaataaaagaagaaacaaaccatgttcacaaattgttagaataaatattgcaaaaatgtcacttctctgtattgatctatggattctatttacattttacaattttttttttagagacaaggtgatttaaaattaaacaggttgtacacattttcatgtttcttagctactggatatcaccttttataaagcgcatgttccaattgcttgcctatttttccctttattgtctgtctttttcttattgaattacagaagttctatgtatcttccaagtacaagtccaagtccttctcactatgtgtattacaaatatctttttccagtttgtggcttgtttttcactctcttaaggaaagattttaacttttttctttatgttaaatgcattgtgtgtcttgttgaagtaatccttccctattccaagaacatgagggtattatcttttattatcctctacaaactttattgtttcaccttgcacatttaagtctatgatcaacctgttattaattttagcatacggtgtgaggtaaggtcaagttttattttctttatatgagggttcaatgtaaactgggtattctgggtcaggtgtggtggctcacacctgtaatcccagcactttgggaggctgaggcgagtggattacttgaggtcaggagttcaagaccagcctcgccaacagggtgaaaccccgtgtctacaataatacaaaaattagcctggcgtggtggcacgtgcctataatcccagctgcttgggaggctgaggcaggagaattgcttgaacccaggagttggaggttgcagtgagctgagatagcgccattgcactctggcctgggcaacagagtgagatctatatctatgtctatatctatatctatggcattctgtatatgaatgttgtaataagttctcttatctagtaaagtgtgtctgtccactttattcctcaagaataccttggctattcttggtccttcacatttccatataaaattttagaaccagtttattaaattccactaagtaagagaaagaaaaaaaaacctgttggagtttttatgagaattatattgggtgtggtagcctgtgcctatactcctagctatttgggaggctgaggcaggaggattgcttgagcccaggaggttgaggctgcagtgagccatgatcatgccactgcactccaacctgggtgatagggaggtcaaggctacagtgagctgtgattgccccactgcactccagcctagagtgagtgccagagtgagaaccggtctcaaaaaacaaattaaaaaaagtaaaacaactaaaaagaatacaacatcacttgcatagtagtccttccatttttgcactacctgagcttagtcatgaggaaacatcagacaaacaggaattgggagatatttacaaaggaactgtatttttctcaaacgcccgtatgatgaaagataaataaaagctgaggaattgtgccattataaagaagactaaagacacattagaataaaatgcattgagtgatcctggattggatttcataccagaaaacataaaaattgctatagaggacatttttgagacaattggtaaaattcaaatacgatctatacattggataatagtgttgtttcaatgttaaatttcctgattttggtaactgtactgtggttatataaataaatgtccttgttcttgggaaataaacatacctaatcatttaggattaaggaacctgatgtctgaaatttagccttaaatgttcagaaatatagaatacgtaatatgaattacataaaataaatatagatttatagatagataaaacaaatgaggcaaatgtttttcatagagtagattgtttaaagacactgtactaggctttaatgtaacgtataaattaacattgatttatgcaaaacaaggctgtgaaagcccacacagcttagctgttcaatatacctgatctcaggtatatgaaagaaagaaggcagacctccctcacttcctttgcaaatttccataggccctttctatggcaggataccaactgccttcttagacattctagaggtccagaggtctctcccaattcattagtctcactgtgaattgtagaaagcatattacagagggtcaataaactttggccaatggtagtgatatttgtaagcaataaaagaaggttgggttgatcagtccgttatagaaatcatatttgataacagtaatcttgctttgtaaatctggcttaatagtttcgagccacaatttaaggctgttcatttatatcatcacctgaagtttagaagataccatggcccacataaaggtaatcattaatatcatctttctgtacatgttcttgtcagagcctgccacgtccatgtcccatttagccttcaaactcacagatgcagattctctttctcagctgaagcacaaggaaaaacagttcagagttatattttaaactaatggtctattgactcctagtaccagttaataggctgggctatctctacttttgctggagaataaaatagtatgaagttaactataatattttcttcttacagcaacaacaaaattctgtaagaaagatcattcccacccaatatggtgctctttaaatggtccacagcttaaaatgtatatgaggtcatatacgcttatatttgcctaaagaaattctggagaatagacccaaaactaataaataaaagtaattaattacctgtgagggctggagagatgaaaattctagagataaaggattttaaaaagtattccctggaagacattttctatttttaaattcatgagctatgtgaatatgttaacgattgagaaagaaaaatccccagctatctaggcagacttcccaaagaggcacctttgactttggaatcatttagctgtagttttctgccctgaaagcctcttttgttatccccggtccatcctgcaggtgtggttgataacagatgtcaaagaataggtgaaattttatgaggttaagtgcaaataatgaatatgaccctctttgcggttcttcctcaatcttctattcaaacataaactcagttcatgaagaatgaagtttgtggcattgctcaagaaaggcaggattcaataaaatctttttagggccaaatggaattttttcaactttaatgattttttctttaattatgttaaaggaagctccagaatctcttttaaaaaagtatttgtagcctgggcaacatggcaaaaccccatctctacaaagaatataaaatattatccagcagtggtagcatgcacctgtagtcccagttacccaggaggctgaggtgggaggatcatctgagcccaggaggtcaaggctgcagtgagccactgcactccagtctgggcgagagcgtgagacctatctcaaaaaagaaatcaaactattttttgtatcgttttgctgattacaatggtaaaatatgtttgttgtagaaactttggaatacataaaaattaaagaggactagttcgttaatacataagtcatagtttaacagggtctaagttagccttccatactttgcccatttacaaagtaaggcataaatttcaattcttttgtaatgtgatggtttatgttttctttagataggatgtgatgtaccaagctgagtgttgggaggaactacagcctctcttttgaaatggaagatcctcggcccaagctataaacatgttagtccaaaattcatctggaattttgttgtttgggatgcaaaacacaatattcccatagaaacaatataaaaattatggctagattctaaggcaaggcaacagatgtccatggaatccagcgactcagagcaccaactgtccaactgtgcttcattttcacagaaaaagggaggctagaacatgtctttacctcaaaaaaagcaaaaacaaagtttatgcaaaaagtattttgttatactgatatgataaatatttaatgagacaaatttttatcaattatttacctaaagtgactttatttcttatttactccattactagcaggtttataagcttttcctctcgcctttattcacaatttctattctgcctttactatttttaatggtttccccattccccagttaactccttggcaaagacagaggatgagtgaaaagcttgtggcctgtagactagatatcagaattgatccacaggaaagaacctcttttcagaagccatctttaccttggggtttgataaagaacataaaagcctcaattggtgctatttaatatttgttccgagaccggtatttgcatttagggtgaaatgacttgatgcacattgtttacagctaactctgaagttcaggggaaggggaataatccactgagtcagaaggcaaatataccagactgatcatgagtaaaacaaagccctggtgatcagctcttcctcttattcactatctgtatctagtgaaaatggtcgcatattttcaagtggatttttaaaagctattctcaatgcttttaaaggttttacaacctcaggggaacaatgcatgcaattgaaccacacaataaacagtaaacaccaattgccccccacaatgaaaagctaatggtctttgagaatactctacaacagaatccacttagcagctactagtctcctgctaatggtcaattcactttcggcaataagaacccaggcaaacggcctcataaattttaaagaacaaagggtacaataaatggactgcaaatcgccgcattctctgtaagcagcactctaaggagtgaaatttccaattgctaatggccagtatattggacaagtggagattttcctactgagggaccagagaagatgacaaaatataatggttttcacaaagaggactagaagctggggaaattaagtccttgggtctgtagcacagtttgagctgtgaaagtcgttatgaccagaagattgtctagccttctctgcggtagcctgggaagctgctatcagattgcttgctgtttgctttaatagtgtatcgagaccagaagcacacacactgctagaaccaaaaatcctggatagatttaacaaaatccaccaacctttcagggaggatacataaaaacatccttttttgcattttgatcttgtgggtacttcagaaatgccatttgattcatgatggtaagtagcctaaacgaatgcaatgatatgtgaattgattaaattctgtatcaaaagggatctctaagaaaggaataataagaacaggaaagtggaaatattgtggaaacatttttgcaatagactgaatacgttttcccaaaattctttcctgcctgcctgcctgcctgcctgcctgccttccttccttccttccttccttccttccttccttccttccttccttccttccttccttcctgtcaggcctctgagcccaagctaagccatcatatcccctgtgacctgcacatacacatccagatagccggttcctgccttaactgatgacattccaccacaaaagaagtgaaaatggcctgttcctgccttaactgatgacattatcttgtgaaagtccttctcctggctcatcctggctcaaaagctcccctactgagcaccttgtgacccccacccctgcccgccagagaacaaccccctttgactgtaattttcctttacctacccaaatcctataaaatggccccacccctatctcccttcgcggactcagcccacctgcacccaggtgaaataaacagccttgttgctcacacgaagcctgtttggtggtctcttcacacggacgtgcatgaaacttccttccttccttctttctttctttctttttttgacagtgtctcactctattgcccaggccggagtgcagtggcatgaccttggctcactgcaacctctgcctcctgagttcaagcaattctcatgcctcagccttcctagtagctgggattacaggcacctgccaccgtgcccagctaattttgtatttttagtagagatggggttttaccatgttggccaggctgctctcaaactcctgatctcaggcgatccgcttgcctcagcctcccaaagtgctgggattacagaccaccatggccagcctgcccccaaattcatatgttgaaatccttccccctaaggtgataagattaggagatggggcctttgggaggtgattagttcatgagggtagacccctcatgaatagtattagtgcccttattataaaagggatcccagagaactctcttgctttctctctaccatatgaagatataatgaaaagactgcagtctgttacccagaagagcactcatcagaacccagtcacgctggcaccttgatgttgaacttccagactccaaaactatgagaaataaatgtctgctgtttatcaaccaccctgtttatagtactttgttatagtagcctgaattgactaagacaattatggagcttgaaagaactgtgagctcctcttatggtcaaaggagctgaaacttaggctttgtcctgaaatttccctctttttttccccctgaatcattaattattaattttccctttctttgatcctcggttaaaaaaaaatcctctcttaaccctatattctgctccagctgtgtctcatttttctgttgtcctttatatcaaaactctccccaaagacttgttatgctttgtcttgacttcctctccttttatctctcttgaacctgcttcactcagacatctgacccaaaactccaccaaaatcgcccttgtcaaatccactaggcaatcttcagtcttcattttattggcaagtcaagagcatttcaaccattggatcactgcctgtttcctgaactgctttcttcacttggctttcatgatagctaatacagagtccaggtagatggcaagtgctttggtttgaaagtatcccctggaagatggagtgttgcaaacttcattgccactgtggtaatgttaaaaggtggggctttctcgaggtgattgggtcatgagggtggagccctcatggtggattaatgccattattgtgggtgtttggcccccttttcctttctgtctctctcacactcttcctctctcactctcaccctttctcacccttccatcttctgccctgccaagggacgactcttcagatgccagtaccacagtcttggacttaccagcttccaaaactgtgagacacaaatttcttttaaaagtaaattacccagtcttgagtattctaagacaaccactaatgactcctgcttccttttccattaagaagagctctttttggggtatagcagcaataggtcttgcatttcccaaacctgtttctccctaggtaggggtaacagaatttgaagtgaggtggttaagaagtgtcttctttactcttccccatctggctccaagtggatgcccagggtgactttggaagcctctgttagcctgggtacctgaataactgtgtggagcagagccccttgtggtgtgtcagatgaacttcagatgtacagcacagcatcagtttctcctgctcattgatgagcatctgcttcagtcttccttattggcaaaccagctgtctttgcttctcagtccacatagtaggcagcctacaaggtagctaactgtagcacctggggtcacatgtttcagccccaaaacatttaatgactgactgaattcctaattctcagaaaagaatctgcttggtccacataagttcaggtgtctacctctggtccaaccagctatgaccagggagatgtccctgaaatatcatcttggtggttggagatctgctctgtgaccttgtgcatcagaacatggggagaggtttcaggagagtttctgtgtgagtgggaaaactattaagtgcctactctacatcccaatatttcactgtttttccctttctctagccccatctcccatccctccacgctccaccccatccactctaaatactcttttactttcttgaatcctcttggtatgtcctgcaactccagtagtcttctctggtcaagtttgcatattttcctatattcagtgcctcagagtcagatcttggaatcctctgacatctccagaccacttgttttctgtccttgtataaagtcatcagctcctttgaggtctacatcatttggctatgcctttctctctcttctctttctgctatctaaccacctcccaggtatccattttcatgcatcaaatattttaccacctgtctcaaagtttcctcttcaatttcagctcctgttctcttccgggtgacttcagctttcacatggcaggtacatcccacaccttgcattctccatgttttgaacgcctctactttatgaccttcttgtcctctccattttagtctaccacatccatggccacacttaaactttattctcatctgaaattgtaccttggaaatcttgaacatcccagtctctaatgacaggtttctgattttgaaattcttgcccttggttcctctcgacagaactgttttcggttttgctctgctccactcttgatttctttccttacccactttagactccatgaactatcatttcaaccactctctttttcaataccctcagctccctttccccttcttccattttaccagctttgaaaatccccaaatctggatgaatacaagaagctgtcctcttcccaccaacccaaatatatgactttatagcagattttttgcctacttaataccccacagaggctctctaatgcctcaggataatgttccaatttaacatggcagcaaagctcctgaagacctggcctctatttatggctccaacttcgtccctcacttcgttttctccactccaactgtactgagctctctcctgtatcttccacacccaaatctctgcactggctttcatacctacctggaaatcttttctcccagctaatgctaagtcttccttcagttcttaacatacacataattttctccttagtctttctcctgaggtttctataactctttctcaaaaatctgcctttagtcgcagtctctgcatcatagagcttgtcacttttatgcaatggtttggttttttcatagactcttgaggaacaaagaggcacggtaccttgtctgttcatcatattcacatttccagcacagattctggatcaaagtaattttttttttcagggtctcactctatcacccaggctggagtgcagtggcgtgatctcagctccctctgccccccaggctccaccccctgggctcaagcgattctctctcctcagcctcctgagtagctgggattacaggcatgcaccacaacacccagctaatttttgtatttgtagtagagatggggttttgccatgctggccagattgttctcgaactcctgacttcaagtgatccactcaccttggcctcccaaagtgctgggattacaggtgtgaaccactgcacccagcccaaagtgagtctttttttttttttttttgagatggaatctcgctctattgcccaggctggagtgcaatggcatgatcttggctcactgcaacctctgcctcccaggttcaagcaattctcctgcctcagcctcccgagtagctgggattacaggcatgcaccaccatgcctggctaattttgtattttttgtagaggtggggtttctccatgttagccaggatggtcttgatctcctgacctcgtgatccacccaccttggcctcccagagtgctgggattacaggtgtgagccactgcgcctggcctccaaagtaagtcttaatgaatattacatagtattcaaatgaatgaatgggtgtagaaggtaggaagataaggttccctcaatgttttttaaagcaatatctgacattgaaaaaattgtacattattattttttattttctctttccttttttttttttttttttttttaatgcagtcttactctatcacccagcctggagtgcagtggtgtgatctcagctcactgcattctcaaccttccaggttcaagtgatcctcccacctcagcctcccaagtagctgggtctactggtgtgcaccatcatgcctggctaattttttttctttttgtctttttagaaacaggggtttcaccatgtggtccaggctggtctgaaactccagagctcaagtgatctgcctgcctcagcctcccaaagtgctgggattacaggcatgagccactgcacccggccattattttcttcttctttttttttttttgagacagaggttcgcttttgtcacccaggctggagtgcaatggtgcgatcttggctcactgcaacttctgcctcccaggtttaagcgaatctcctgcctcagcctcccaagtagctgggattacaggtgcttgtcaccatgcccagctaatttttgtatttttagtagagacggggtttcaccatgttggtcaggctgttgttgaactcctgatctccagtgatccgcctgcctcagcctcccaaagtgctgggattacaggcatgggccactgcacctggcccattattttcttaatatttatgttttgcttcctttcagtagaacagacacacaagaagtaattcttagaaaaatgctgatgagcacctggaggctctgatgtccacactagatgccttagaaaaaagaactatagccattgctattcccatcattgtgctgcacagaggaatgtaggtatccctgggctttacatgtaagggcaaacaggacgtgataaccctccaggatgtgtttgagaagggacatgtgccttgtggagccaagcactccttcctatgctccctccaacaagtttaagaaatatttatttatttatttattttttgagacggagtcttgctctgtcacccaggctggagtgcaatcgtacaatctcggctcagtgcaagctctgcctcccaggttaaattctcctgcctcagcctcccgagtagctgggattacaggtgcccaccaccacgcctggctaattttttgtattttttttagtagagatgggggtttcactatgttggccaggttggtctcgaactcctgacctcatgatccacccgcctcagcctcccaaagtgctgggattacaggcgtgagccaccgcacctggccttattgatttattaatttgttgagcacaggcgagttggacgctaagaatatcaacatagaaaaagcacagaacctgcttcatgggacttattgactagaaacagatgatcagatgagaaaataggcaattacaacatgatgtcatgtgctgtgatagaggtaagcacaggcttccatgggtgccaaggaggaatctctaacccagcctgcaatggtaagggaaagttccccagacgtaatggcaccagaacttagtcttgaaagaacaggaattacagaggagaagtggagatggttgagggcattcccatcaaaaacccagagagggccgaatgtggtggcacctatattttagggtatatcatatatgataagttgtaaagaaaagcaagagaatgattagcataaaatttagagtagcagcctcttttttttttttttttttttgtagagataagagtcttgctatgttatccaggctggtctcaaactcctggcttcaagtgatcctcctgccttggcctcccaaagtgctgggatcacaggtataagccattgcacctggcccagttactatttttaaagtaagaagttggtagaaaactggtacaacttaggacttccatttcctggtgacaattgtccttatcacctcataggtctttgaggaaggttagatgtgatcaacaatgatgtcctgttctgactaaacgttaattgtctagcttcagaggcagagcctgagttaggtccctttctctgtggtcatgagaacctgactcagtgacgttgactcacagaatgtgagcttcatcactagctcttatcaccttgggtctagagggtcagaaatggaagctctcctgcaaaggggggcattgagagttcaagtttctcactagtccaggcaggagtgggtacatgtttactgcagaacagagtaggtgtgacctggcataacagcctaggggtcttcaaagaaagctgggtcttatcttatctcgctagaggaaagccagtctgagtaagggggtggaagagcggtggaccatctagggatccaacaaagtcgcatttcaaagccggatgtgatgccaggcacagtggctcacgcctgttaatcccagcactttgggaggccaggatgagcagatcacttgaggtcaggagtttgagaccagcctgcccaacatggcaaaaccccatctctactaaaaatacaaaaattagccaggcatggtggctggtgcctgtaaccccagctacttgggagggtgaggcagaagaatcatttgaaccccagaagaagaggtgggggttgcagtgagccaagatcgcgccactgttctccagcctaggggacaaagtgagactttgtctcaaaaaataaataaataaaaaataaaaaagctgaatgtgttttggcagggtctaatcactcattcctctaagaggcatcagaggcccattatcaagacaggtggaaagtgctttgaaacatgtttaataaattacttatccagcacttagctagtccctgctacatgccaaggctctttacaaatattagcccgtgtaatcctcataacaaacctatgaggtgggtaatattattatcctcatttcaagaggaaggtatttgcctgaggggatacagtgaatatgggagatggaacgtgggcccagaagcccagctccagatccaggttcatcaccaccatgctgagctgcctggttggtctctagaagctctcacaatacctgtggctgacccacagctccagtttgcatgggcagagggaaaggattagcccagcttcctgggccagtgtgtaggtgctggcttgtctttgtagaatttaactattggctaggagccaatggcaggatttgcatgacccaaagaccagcccaaaatgaatgacgctggtggcctttgtgctaggaggactgtctcgccttcttagtacagactttctacaacagcgctggggacaaaatcacaggaaagtacaagaagcagggtggaaacgtgcattcaaatgataaactggctgaaggatctagtgagtctgctagaagagcaagggtcaagaacagcttgcagccttgaccatcgtgggcaagtctttccatgtcctcgcctgtgaaatgaaaagttacaccaggagttcccaagcatggctctgcctctgaattccctggagagagagaggaaaaaatataggcttctcatcccaacctgtgcaattctgacttatatagaaaactagacacaattctggagtagtttattccccaatgattctagattatcaagtttttagcatgtaggaggctcataagaaatatagagttctgcattactgtgaggtttggcttcatttcagaatttaaaagagcaggacacggtggctcacaactgtaatcccaacactttgggaggccaaggcaggcagatcgctagagttcaggagtttgaggccaacctgggcaatatatcataacctcgcctctactaaaaaaaattaaaaactagctgattttggtggctgacgcttatggtcccagctacccaagagactgaggtggaaggacggcttgagcctgggaggttgaggctgcaataagctgtgatctcaccactgcactctaacatgggcaacagagcaaggccctatctaaaaaaaaaaaagaaaaaagaaaaagaaaaagaattcctaccaaaatgccaaaaactccaatatgtataggagtcgacgtgacaaagttggttagggacaaataaaaacctagatcccccttctcttataaaaataaatgatttaaaattttattttttattttttgtatttttttgagacagagtcttgctctgtcgcccaggctggagtgcagtggtggaatctcggctcactgcaacctctgcctcctgggttccggtgattcccccgcctcagcctcccaagtagctgggatgcccctgccatcccatctggctaattttttttgtatttttagtagagacaggatttcaccatgttggccaggctggtcttgaactcctgacctcaggtgatccacctgccttggcttcccaaagtgctgggattacaggcatgagccactgtgcctggccctgatttaaaattttcaatgtgaaggaaaagcccttagagcagacaggatgccagacactgcatccccgtctttgaactctataacaactctgtgttatgttcagcctcttcccattgtataggtgaaaagtgaaattcggaaaaaatgactatttgctaatgatcgcaaagctcataaagttctgccagacactggatttatacatttccataaaagctatccatgtgttcattcaggtatttgcttatttgcaaataaataaatattcgtttattcagcaaatatttactgagtcctatgcttttcttaacactgagaacacaaaaatatacagactgcactatatacaagtataaggatatcacatgtaccccccaaatatagacaactattatttatcaatttaaaaaatttaggcagaataaaatattcatgccaaataataagtttagcctcttaatccatccttccttccctttcttgcttgctttcttgctttcttttatttctttttatttatttatttatttttgagacagtttcgctctgtcacccaggctggagtgcagtggcatgatctctgcttatgtaacctctgcctcccgggttcaagcaattctcctgtctcagcctcccaagtagctgggactacaggtgcccaccaccatgctcagctaatttttgtatttttaatagagacggggtttcatatattggccaggctggtgttaaactcctgaccttgtgatccacccacctcggcctcccaaagtgctgggattacaggtgtgagccacagtgctcggcctatttctttttttttgagacagggtctcactccattgcccaggctggagtgtagtggcgcatactctgctcactgcaacctccgcctcctgggctcaagcaatcctcccacctcagcctcctgagtagctgggactacaggcttgttccaccattcccggctaatttttgcattttttgtagagacagggtttctccatgttggccaggctggtctcaaactattggcctcaagcgatccacctgcctcagcctcccaaagtgctcggactacaggtgtgagccaccatgcctggctagctcatttcaaaatattcccagtctttccaaaattaggaagccctgaggggtatagaaaagatccaaactccccacaaattaactttgataaatccttgactgtctactactaataatcttatttttgctaagaacatcttttctcagtccacaaccagaaaacattcctttgacaacttttatggctattaatattgaaggaaatattgaaaaagagtcctagaataagtaaaattcagttttaagaaaaagagagaggcaattataacggacattcatgcttcataaaacttttcttttattattattattattattattattattactattattattatttttgcgacagagtcttgctctgtcgcccaggctgtaatgaaagcatcacaatcttggctcactgcaaactctacctgcagggttcaagtgatgatggtgcttcagcctcctaagtagctggaatttacaggtgtgtgcctccacgccaggctaatttttatgtttttagtagagacagggtttcactgtgttggccaggctggtctcgaactcctgacctcaagtgatccccctgcctccgcctcccaaagtgctgggattacgggcgtgagccactgtgcctgtccccagcacaaaaagttctgatagctccatgttcctttataatcttgaacgataatacataattttacaaaactgtcattagtgtgcatacaatttggtgatattttaaatgaaacacattttcaccagcagttttctaaggtgtggcagaatacgcaagtgttttgcttttgatactatacaatgttgttgggcacaatcacttaaaaaacatactgacccatgaagtttagctcttggagtttccttagagaatattcggaccaaatgtactattgtgtgcttgaggaagctgaagactagaacttgcccacacctcttgtggggctcattccctgcacactgcttctgaagagagcatgagagcctggtgagtttgacttccctgaactaggcctgaagctaaaggtatggtatggagacaaggtaaggaatttcagtggtgagagttccaggatcatccatgctgtggctctgcagctcttgctgcaaattcccagttcatttagataagaaaacaggagtggaacaggtgagatgtccacacagggtcaggatccatggcagaagcagaatatctttgtgcaccttttcctgggtgcccttcaaggtatgtaacagttgttagatgaagggagaagttcttcgttggtcaggaacttcattctctctaacctcaactgtatctgaagactctcaacatcatggaattgtagttagaggagatgttggaatcatggcgggaggagcaggtagctctgtggtttccaaaagccactgtagaggatcaatcagcaggtttggggtggagccccagaatctagagtctaactttcaaaagctctttaagtgattctgatgagaaactggttaggaaaacagtgaagtagaccaccctctcacctaggcagggagtcacttccattcagtggaaagcccatgaggatgtgaggaggacttaaatatttccaatgacagagaactcaagtttctgaaacttactcccagtgggaattcccccaccccatatgaaaaaaaaaaaatttcctttcattccagtttatctatggccagtagttgtttgaaaggaatttatacctctgcaaagaagtcactaaaaactgtcttacaaatactaaaatctactccttgaatcaatttagcaaaatgctttgacctgataactccatttttgggatattatcctaaggaaataatcaaaaatatttttaaaaagaaatcctttatgaacagttttgtttattgcaccattattcatactagagcaaagaacaacaatgacagctcaattagagacctgttaggtaattggagaatggttaaataatctttggcatgtcaactcaatgaaatattgtgtgaccacttaaaaggatttgacagagtttgaaactatgtgaaaaattgcttctgttaccctaagtgagccatgattgcatcactgcactccatcctgagtggcagagcaagaccctgtttcaaaaaataaataaataaaataaaatacaataattaaaaagcaagacataaatttgagaccaggtccagtggctcacacctgcaatcccagcactttgggagctgaggtaggaggatcatttgaggccaggagttcaagaccagcctgggaaacatactaagaccccctcaccgtctctatttaaaaaaaaaaaaaaaacaaaaaaaaaaacgggtgtggtggtttatgcctatagtcccagctactcaggaggctgagatgggaggattgcttgagaccaagagttacaggttacagtgagctctggttgcaccactgcactccagcctgggtgacaaagtgagactctgtctcataaagaaactttaaaaatcaccaagatgatgagactttaatagaactttagagtattccatttagaaatgatgtcctagctgggcacagtggctcacgcctataatcccagcactttgggaggcagaggcgggcagatccagaggtcaggagtttgataccagcctggccaacatggtgaaaccccatctctactaaaaatacaaaaattagcagggcatggtggcacacgcctataatcccagctactcaagaggctgaggcaggagtattgcttgaacctgggaggcagaggttgcagtgagccgagatcgcgccactgcactccatcctgggcgacagagtgagactctgtttcaaaaaaaaaaaacaaaaaaccagaaatgatgtcctagacaatacatgtacactgagatgagaaaatcatgaaaatgccaaagtgttagaagagaagataatctagatcagtggatcctgatttgactgcccattggaattacctggtgagtggttataaatcttgatgcctggccacacctaaacaatcaaatccatagaaatttttaaataaaaaaaaaatttgaacaaaacatatgatagaaattttgtaaaataaatacaactccataaaggaaggaagttcttccttcctttctttcaatttctttcctttgaaaagaaatcaaaatataaaagtggttgatttgaatgacagggatgtaggcaattaatttttatcttcaagggcttttttcccaagtttatttgctaaccattgctcagataataaaaattatataacaagcagttaataaaatgtttcattggctcagtattgccatgtagaaaaattccaactttaataaaatataccttaatttattatttaattaagggtgtggtatgagcccttccagtgaccagcttccgctgaaactcacatcctaccctctcaaccttgctgatctgctctctgtgctttcttgctcctctcgtttcttttgttttgttttgtgtgttttgttgttgttgttgttgttgttttgcttgtttttttttttttttttttgagacagagtctcgctctgttgcccaggctggagtgcagtggtgccatctcagctcactgcaacctccgcctcccgggttaagcaactcttgtgcctcagcctcccgagtagctgagactataggcacctgccatgacacccagctaatttaaaaaatatctttagtaaagacaagattttgccatgttggccaggctggtctcgaactcctggcctcaagtgatccacctgcctcggcctctcaaagtgctgggattacaggtgtgagcccccatgcctggccaggaacattgttaaaagcccagcttacagagcccaggatcacagagccagcctaagattgaagctagaccagggcaacagagaaccccttcctaacccccaccatgagcctaacagcatgtaccaagcaataatagtctacaactaggggaaggacaaaggcaagcagaaaggtcctctctgtggctcagttggcagagatagctacaagatgaaggtggggcaagaatatcccctcacctcccacctgaatcacaacacaagcgaggagaatttgaagctggtttgtgcactgaaggaaaccatagcaacaacaaacccaaacctactcaactcctgactagactgattcaaccctccacattaatgacctgtcataaaaggtgtgcccatttcagacataaataccacttacttcagtgtctactgtcctacaaatgatgccaggtattcaatacaaagttatgacatatcaaggaaacattaaaaacaaaaagcaacaaacaaaatcccaagagataaagcaatcaatagcaagagattgatctatgagcaacattttgaaactatcaagcaaggaattaaaaataattaggattaatggattaaaatatctgataattaaaaatgaacaacaaacatgaaccgatgggtaatttcagcaaagagatggaaattataagaaagtcaagaaggaacatcttcaaaacagcaaacaaggaactccaaaaattcactactccattaaagcaatgagaacattgtcaaaataaacttttacaactgtgaaaattaactaaaggcttgcaacatgctgagaactgaaaatattgagaagcacttatttaagaaaaatggctgaggctgggtgcgatggctcacgcctgtaatcccagcagtttgggaggccaaggtaggtggtttacttgaggccaggagtttaagaccagcttggccaacatggtgaaactcagtctctactaaaaatacaaaaaagaaagagaaggaaggaaggaaagaaggaaggaaggaagggagggaagagagagagaaagaaagaaagagagaaagagagagagaaagaaagaaaagaaaagaaaggaaaagaaaagaaaagaaaaaagaaaagaaaagaatagtcgggcatggtggtgcactcctataatcccagctacttgggtggctgaggcaggagaatagcttgaacctgggaggtgcaggttgcagggactcgagatcacatcactgcactcagtgcaatgagatgtctgttttggtaccagtctgtgcactacacaaggcaatgagatgacattcaaaatgttaaaagaaagattgtcaaccaagaattctatatcagcaaaccttcaaaaaacaaaggagtaattaagacatttacagatgaacaaaaactgagagaagtcatctttagcagacttgccctacaagaaattctgaaaggaatccttcagcataaaatgagagaaccctacatgttaaatccacatgaagaaataaaaagtatggtaaaggtaactacataggtaaatgtaaaagacagcagaaaagtgtttttatttgtaacccctttcttttcctctcttatttaaaagacaactgcatacagtaataattataaaactatgttgatttgtaatgattatgaaccaactataaaccaactatgttggtttataatgtatagttagtatgacaaaaatcgcacaaaagtggtatgagagaatgaagttatattgcagcaaaatgtttgtatactgttgaaattaagttggtattaatccaaactatattattttaaattaatatattaattgtattccacagggaaaccaccaaaacaataactaaaaacatatagtaaaagaaacaaagggattaaaattgtatactagataatagccattaaacaaaagaaagcagtaatgtaggaataggaaataaaaaatatataagacatagaaaaagaatagcaaaatggcacacaaatttaagaatgaaagactaaacgttttccccttaagactaggaataacaccaggatgtccactctcaacacttctatttaacattgtactgaagtttctagtcagggcatttggtcaagaaaaataaataaaggaacctagattacaaaggaaataaaatgatctctatttacagataataagattttgtatatagaaaatcctaagaaacctaaaaaagaacttattagaactaataaacagttaagcagggttacaagatacagggtcaatacacaaaaagaaaatatattgctatacattaataataaataactcaaaaaaataaaactaaggaaacaatttaatttacaatagcatcaaaaaagaataatatacttagtgataaatttaacaaaagaagtgcataacttggacattgaaaactgtaacacgtcatagaaagaaattaaagaaggcctaaataaatggaaagaaacccatatttgtggattgaaagactcaatattgttaagacggcaatcctccctaaattgatctacagattcaatgcaatgcctttcaaaattccagttggctgtttttttcttttccttgcagaaaatgacaagctgagtctaagattcatatgaaaatgtgatatggttaggctttgtgtccccacccaaatcttatcttgaattgtaatccccataatccccacgtgtcaagggagagaccaggtggcagtaactgaatcatgggagtggcttctcccctgctattcttgtgatagtgaatgagttctcacaagatttgatggttttataatgagctcttcccccttcactcagcacttctccttgctgctgctttgtgaagatgtcttgcttcccctttgcctcatgccattattatgagtttcttgaggcctccccagccatgcagaactgtgagtcaatgaaaactccttcctttgtatgggttcatgtcctttgtagggaaatggatgaagctggaaaccatcattctcagcaaactatagcaaggacaaaaaaccaaacaccgcatgttctcactcataggtgggaattgaacaatgagaactcttggacacaggaaggggaacatcacacaccagggcctgtcatgaggtggggagagtggggagggatagcattaggagatatacctaatgtaaatgacgagttaatgggtgcagcacaccaacatggcacatgtatacatatgtaacaaacctgcacgttgtgcacatgtaccctagaacttaaagtatataaaaaaaaacaaaaaacctctttcctttgtaaattacccagtccccagtctcaggcagttcttcgtagcagtgtgaaaatggactaataaaaaatgcaaaggatccagaatagccaaagcaatcttgaaaaagaaacaaagttggaaaactcacaccttcagatttcaaagcttacaaagttacagttatcaagacagtgtggtactagcataaggataggcatatgggtcaatggaatagagttgagaattcataagcaaattcatatttatttatttattgagatggagtttcattcttgtcacccaggctggagtgcaatggtgtgatctcagctcactgcaacctctgcctcccaggttcaagctattctcctgcctcagcctcccaggtagctgggattacagggacccacgaccaagcctggctaattgttgtatttttagtagaaacagagtttcaccatgttggccaggctggtttcaaactcctgacttcaggtgatccacctgccttggcctcccaaagtgctgggattacaggtgagagccagcatgcctggccaaattcatacatttatgaatttgatttgtaccaagacaatccagtgggaaaagaataggcttttaacaaatggtgttgggacaactggctatccacatgcaaaaagaatcaagttggacttcttccttatgccattttaaataaactcaaaatgaagcatagacctaaataaaagagctgaaactacaaaaccttttgaagaaaacaggtatgaatatttgtaaccttgaattaggtaattgcttcttagctatgacacctgaagcataagcaaccatggaaaaagaaggactgctagtttattttctcattgatttgtgggggggtccatgtatctagggaaacaatccttttctcagttttaggaattgcaaatatcttcgaccgttctgttatctctcattaattttgtccatgattatccttttttgatcttaaatatttatctttgccttgtggcttatgctcttaaagttttgctaaaagtgtcttttttcatccttaggtgacaaatatatttttctatatttccttctgttaagttggcggttttatctttcatgttcaagccaataatccatctaaaatccaccttttcatgtattttcatttagggatccagattcatttttctccatacagtgaatttgtttccctcaaagtgtataccatataatcatttccccattgttgtatggacccctctttatcataaattaagtttcaatatgtaaataggtctattcctgagttcctatactgttccatagatctatgtttgttcttacaacaatattttaaaaaaattaataaggctattagaaaagtaggactagaaggacattttctttttctttttttaattttatttatttatttatttatttattttgagatggagtctcgctctgtcgcccaggctggagtgaagtggagtgatctcggcctactgcaacctccacctcccagggtcaagcaattatctgcctcagcctcccgagtagctggacttacaggcatgcaccaccaaacctggctaatttttttgtactattagtagagatggggtttcaccatgttttccaggttggtctcgaactcctgacttcaggtgatccacccgtctcggtcttgcaaagtgttgggattacagacgtgagtcattgttcccggccagctacacttatttcaaaacaaaaaaggtagctttttttaagtccatgagcagcagaatcaatatcaagtagaatggtgacagcctgcccttcaagacatatttatttattcttgctagaaatgagtatataagttgctatggtgatggttgtcaactggaccacagagctggactggaccttcaatggggtgaaaagtaggtaacccctgctgcctgtgagaggtaagacatccagcatctcatcaaactgatgctaaagaaagattttctgctccctgtaacataaaaggattttactgcatgggtatatcagtaagtgcatttaggtcaacaaacagttctactcaacaaccacacaatatgtagagcttgctcaagcaaattgtgtgataaccatgtgcttttatagacaatgtaagtcattgctacatattatttgtaatgattgttggcttgtttagtgcggttccaggtcttttaatcccttcacatatgaccccaaatttgagaagtctgtcagatatccaagtggtgatatctggtggacagtaggatgtcagtctggtgcttgccagagaggaaactatgagtttgaccgtggtcaattctatatcttcctgggactggaagagatcacttagaggaggagtgtggatatagagaaggagaaggatgaagacaaaagtcctcaagaacatcaatatttagaggttgaggagccaaagaggaattagtcaaggaaaaaaggccagtgtggtgggaggagagtcacagggcctgaaagtgttttgagaatgaaggagaactcaagtgtgtctatcgctgctggcagatctagttaggtgaagatggagaactgtctttgacatgggtcaccctgtagtatgataataactctaagaagtgccattttgattgaatggtggacactgcaaaagctcagttggagagggttcaagagcccatgggaggtggaaagtgggcaggcaaaagagggagtggctggagtgaatcaagagagaatactttttaaagacatatgaaatcaaatcatgtttatttgccaatgggaataatttggttgaggggacaatcaatatggcatgaatgaaggggatatttgcaagggcagagttcttgagagcagaaggagattgaaactcaaagcacaagtggaggagtggccttcatccctaccaagagagaaggtggattttgcaggtacaagcccaggtaaggtgatagatgcgatggtagggatggaatggttcttttttgactgtccacctttctatgatatattgggcaatgctgttggctgagatgggtggtggggggggcaggtgagggtgataaacatgattagatttcatatgtctttaaggaagtgtggaataagcatcccagaaagtaagaggggaatgttttcaggaattgtaagtggagtgacagacattcctaggtgtcatgtgagagttgtggtcataattttgaagtaaaccaagttggattggtttgtatgattttttaaaagtattcatctgtttaggtgtgggtagagtcaagaaacagtagagctagatcagggtttggtgtttcctaggtgtatcaattaggatgtttttcattgtgagtaacagaaaacctctctcaagccaccttcaacaataagaaaatgaattattgaacttaaaagaaggttcagacgtaggtcaagctccagggttgttgattcagtggccccgtgagttcatcaaggactcaggttctttttccctctacttggctgtctatggaattggctgcttctcgtggcttgcaccctgctcttgtgatgcagtggctgggggcagtcagtctacctctacccgcttcctcattcatgtggagcaaaagagagggaaaccctctcatgctctcaccagccagggaagacagggcatttccttcaggcattaacagttaccatgggaatgccatgtgctggtggcttcagtctggtcctcctgaatcagtcattggcaagcaccaagggatttctaggatggatttagaccagtggttctcaaagtgtgatttttggaccggcagcatccgcctcacctgggaacttgtttgtttaaaattcaaattcttgggcctcactctagatctattatatcagaaattctggggggtggggccctacagtcagtattttaacaagccccccaagcaattctgatgcacggcaaagcttgagaactaatggcttaggataagacagtgaatgccatgaacaaaatgagggatctttgaggaaggaggatatggcaataaacatctactagtggctactagaccaggtgggcacctgagagaaggctcacagagttcagggtgcctgcgatgcagacattctagggaagggctccaaaacaagggttagaagaaaaatgaagacacagaggaacaatggatccggtaaaagtggtgaaattagtagactggtgatcacaatgaagctggagaattgcaatgagttagcaggatagaagacgtgatggccacacagatgaactcacagaactccaactgcatgtctgaaccaaggtcacactgactattcactgctctcagccaacaaatgagggtggcaagaatgctaaggcctaagcttcattcagggccacacgctcttcagatggttgactttggctcaaggaccaccaccaactccccatcacctgactttggtgagccttctttagactgcatgttctgtttctttgtttgtttgtttttggaaacagagtctcactctgtcacccagactgaagtgcagtggcatgatctctgctcactacaacctctacctcccagcttcaagcaattcttctgcctcagcctcctgctgggattacaggcatcctccaccacaccaagttacattttgtatttttagtagagatggggtttcaccatgttggccaggctggtctcaaactcctgacctcaggtgatctgcctcccaaagtgctggattacaggtgtgagcccccatgcccggccctgcatggtgttctaagaatcttccatccaaccttctctctcattctccttcactcatggttagacttgtatcacagttcagcagcactgccatatttacccaactccgtccctaatttttttctcacagaggcacttccccttttaatatttttggcatctgcttcttgggagaatgtagactaatatggaagtttcctgagtagagtttgaaaatgagattgtgtgtcaggtactgtgctatgcatggagtatggtagggtggtctctgccttgctagagcaccactgaggaatacagatgtataaccagtcactgcaggacagcatagtaaggcatcatggggcagtcccagctgctggagttgacgtgggcatgcttagggatggtggaaagatgatgatactgttggtagggtggatatcctgccaactgatagcacacccattagtttagggaaagacctggtgttcagttgctagcctctcaaagagttgtccccacaaacacgtgtgtaagtatagctcaatgactacactgaaaggatatagtctcaatgaatgtcattggttcctacaggcatgataagacaatttctatcattattcctgatatggtttggctgtgtccccacccaaatctccaactgtagctcccataatccccacgtgtcacaggagggacccagtgggaggtaattgaatcatgagggcagttttttcccatgctgttctcatgatagtgaataagtctcatgagatctgatggttttataaagggaagtttccctgcacatgctctctcttttgcctgccaccatgtaagatgtgactttgctcctttcccttccaccatgattgtgagggctcgtcaaccacatggaactgtgagcccattaaacctctttttctttataaattacgcagtctcaggtatatctttattagcagcatgagaacagactgatacaatttcctttcccatggccttcagaaaatagatggatgacttcacggatgttgaggagagaggcaaatactttataacggtttgctttttgtgacaaagtctttgttttctgcctgcctttctctaacatttcccctagtgactgtcaacccacaatgagtggttctttccctactgactgcactaggtagttgtgagggaccatgagataaagccccaagctcccttaacaacagtaagctgctctcccatgcagagtccttattccatctccaactcaggcctggctacaggcacctgaggaaaggagtgtgctccagtctcctgggctccacacacttccattctgaagggaatgttgggtcccttttggatttttatcctgaaattcaagatccatgaatggattcgagggaggctaaatctcctggaattatgtgtacatttcttcacacaatttttttgtatacaatttgcaacacagtttttttttgtcatttttgtatgtttatgacatgttaggggcataaaaagggatggggtccatagttttttattatttctcaagtttgtgacctcaaaaaatattgagtcagtctttttttttttttttcagatgagtcttgctctgttgcccaggctggagtgcagtggcacaaccttggttcactgcaacctctgcctgctgggttcaagcaattctcctgcctcagcctcctgagtacctggcattacaggcacccaccaccattcccggctaattttttttgtatttttagtagagacagggtttcactgtgttggtcagactggttttgaactcctgacctcaagtgatccacccacctcggcctcccaaagtgctaggattacagatgtgagccaccccacccggcccagtcactttttttttttaagagaaaaatactcaagcctttatagggtgtctagatgaaaaactgcctttaaagggtatctgttgttgtagttatccattttaattttaatattattattctactttattttatattttagtttagacaggggcacactctgtcacccaggctggagtgcagtggtgccatcatggctcactgcagcctcaacctcccaggcagaagtgatcctcccatatcagcctcccaagtagctgggaccacaggtgtacaccatcatgcccagctaatttttaaattattttctgtagagatggaatctccctatgtttcccaggctggtacgcctccattttagattaaaagaaaggtccctttttctttgtggtgatataagaaatactgtattatggaattttgtgggataataataaaagggggctggtatatggaacaaaaggaaattaattttgtaccttaataaatctatgtcataagagaattttaacctccatagaacactgtcttggaaaccgaaaactaaaaagaagaaaaacatcataatttttcttttttaaaaattctcttttctttctttgttctttttttccttccttcctcactccctccctctctctttctttctggttaatcttaggcctagttatttccagattaacaggcaaaagtcttcattagagttatagttacaacatgaaaattacaggacaaacttaactgtgttacaaaaatgccaaacgcagatggaagtgtgcaattcttgtctgtctgaactttccctcattcaccacgagagggagcgccacaccacagggacagctcccttcactgcctgcatagctgtcttaatggtctgctatgtcgtgaacattttgcaacgtatgcacagaggtcagcaaaatcatggaagaacagggccttgctgattggtatacatgtcatgaggggccccagcagacctcagctctgtgttcaggtcaagaagctgcaggtgacccgagacacagcagctcctaaccacgccctgatgtgcagcctgcgtgctgctgcggggcaggtcctgaggcctccatcaactcatcttttctagaatgacaaagtgaaactcagttccttcctctacaggtgacaaagcaggtagagtaatcgatgagctaataagtgagtagacatgctaaagcatttatgagatctattatgatctcctgtgaatgataggaaagatgctatagatgagaagctgacatcaggttcagttatttttattcacaattttctatcaccagctctgtgctggtgattgtatttgaagtgtatggtctcaggtattgatgacagctggagggagatccttggaggctggccttcaggctcttttggtttttattgtttttaattgtggtcaaatatacataaaaataaccccttttaaacgtgcagctctgtggcactgtgtacattcacgttattgtgcaaccatcactacagtttatctacaaacccttttcatcttctcagatggaaacacggtacccataaaccaacaactccccattctcctctcctcccagtccttggtaacttctgttctactttgtgtctctgactctatgaatttaccttttctattctaggtaccccttataaagggaatcatgcaatatttgtctttttaaatctgggggatttcactcagcatgtcttcaagattcatccatgtggcatatatcaaaatgtcactcctaaatgtggtatatatgtaaggagttattatttatattgtatatattccacacaatgggatattagccataaaaaaaagaaatcctgtcctttgcagccacattgaaggaactggaggtcattatgttcagtgaaataagccaagcacagaaaagcaagtgtggcatgttcttacacatatatgggaactaaaaatcctggatgtcataaagacagagagtagattggtggttaccaaatgctggaaagagtaggagaaagatggggatgaagagaagttgattaattggtacgaatgtttagttaaatagaagaagtaaggcttagtgttcaatagagcagtagggtgatgatacttaacaataatctgttgtatatttcaaaatagctgtaagagaataattcaagtgttcctagcataaagaaaagataaggcctgttgcagtggctcacgcctgtaatcccagcactttgggaggccgaggcaggcagatcacgaggtcaagagatcgaggccatcctggctaacacggtgaaaccccgtctctactaaaaatacaaaaaaattagctgggcctggtggccggtgcctgtagtcccagctactcgggaggctgaggtagaagaatggcatgaacccgggaggtggagcttgcagtgagccaagattgccactgcactccagcctaggtgacagaacgagactccatctcaaaaaaaaaaaaaaaaaaaaagaaaagataaatatttaaagtggtgaatgtgccaattaccctgatttgatctttacacattatatgactgcatataatgtgtatatataatatataatgtatatagacatgtactccaaaaatatgtacatctattatgtatccataaacttaaaaaaaagtctctgttgtttaagcaaaaaaaaaaaatggttgttcatttttaaggcgaatagtattccactgtatgtatgtcttaatgtgtttagtgttataacagaatacctgattctgggtaatttattctaaaaagaggtttatttagctcatagttctacagatcaggaagttcaagggcatggtgctgatttttggtgatggcttccatgctgtgttataacatggcagaaggtcaaagcgggagcaggtgtgttcaatatcacaagagcagtgatatcactttataagaactcccaggccgggcacagtggctcacgcctgtaatctcagcactttgcgaggctgaagcatgaggtcaggagttcaagagcagcctggccaatatggtgaaaccctatctctactaaaaatacaaaaaaacaaaaattagccaggcatggtggcacacacctgtagtcccagctattcaggaggctaaggcaggaggatcgcttggaggttgcagtgagccgagatcgcaccattgcactccagcctaggtgacagagcaagactccatctaaaaaaaaaaaaaaaaaaaagaactcccacttccaggagctaatccattcctgagcaggtgagagctctctctcatacctgtgagtgagacaacattaatctattcgtgacgatggggacccatgaaccaaacacctcccactaggctccacctcccaacactgccatgttgggaatcaaatttcaacatgagttttaggtagggataaatcacatcaaaatcatagcagtatacaccacattttgtttatccattcattctttgatggacatttgggttgcttctggcttttggctattgtgagtaatgctgcaaagaatattaatatacaaatatctgttccagtccctgctttcaattcttttgggtgtatacccagaaatatagcacctgataattctgtgttgaatttttttgagaaactaccatactgttttcctcagtgactgcaccattctgcattcccactagcaatgcacaagggttctaatttttccacatccttgccaacacttattgttttcttattttctctttttcagaatagccatcctactgggtgtgaaatagccatcctaatgggtgtgatttgtcttgttcaacagttttatcagtgatttagatggaaacaaagaaaagttgcttatctgatttgttgagcaaaggaaggtagaagccgatgtgttatatgacagaactgtgaaccaaaataaagttgctcacttacacaggggttgacaaactatagcctatgggagaatctggctcgctgcctgtttttataaacgaagttttattggaacatatctaccttcatttgttcatggatgtctatggctgctttgcgctgtaatggaagaattggttacttgagacagagactgcatgacctataaagcctaaaacatttattatttggcccttttcagaaaaagtttgttgacttctggattatatgtcttttaaaattctatttatttattttttattttattttattttatttatctatttgagatggagtctcgctctgttacccaggctggagtgcagtggcacgatctcagctcactgccacctctgcctcccaggttcaagcaattctcctgcctcagcctcccaagtagatgagactacaggtcaccaccacgcctacctaatttttgtatttttagtagaaacggggtttcaccatgttggccaggctggtctctaactcctgacctcaggtgatccacccatctcggcctcccaaagtgctagaattacaggcatgagccaacatgctcagtctgggttatatgaaagagacaaatttaaccagaaaatatttaatctctataagtataaaatatttgtatgtaagtaattaaaacaacaaagaattgggaactagctgggcgcagtggctcacgcctataatcgtagcattttggaaggctgagggaggaggattgcttgagctcagaagtttgagaccagcctgggcaacgtattgagacctcatctctaaaaaaaaaaaagagagtcaatggctttctatcatgtaaaaagagacatggtgttttgttttgttttttaacagtagactaaatatgactcaatattgactttagtgttgattgtaattttataccacattaacaggaataagcatctataacagtgattctcaactttggctgcacatggaaatcacctagaagatttaaaaatactgatgtcaaatccctggggaatctgatgtaaacgggctgggtgtggcctgggtatcagagattttaaagcttctcaagtgattcagtgtgcagttgtgacattccccctctgctggactcaggcccagtctcacctacagcttcattccatatgtcccattttatttattttttatttttattttttgagacagggtctcacactgttgcccaggctggagtgcagtggtgcaatcatagctcactatagccttgacttccagggcccacacctcagcctcccgagtagctgagaccacaggtgtgcgccaccatgcctggctaatttttttgaatttttgtagagatgagatctcactatgttgcccaagctgatcttgaactcctggtctcgagcaaccctcttgccttggtttcccaaagtgctgggattataggcgtgaaccaccatgcatggctgtgtcccattttaaaggaaataaagacaagctggttccttttcaaggaggaggagtcagaattgttgggggggaaaaaacaggaattcatttttataagaggaacaattgcagaaagtacaagtgtgaggatcctggagtgagatgtttctagctggcattctgcgtttgagggctgcctcatagaagaggggcctgactgcttttgtatgacatgacccaaggatacaagctgggagcggggagtagaactgccccgctattattatgacttttctttgaaaacagtacgatccaaagagggatagtgccagagggtccacccatcccccagatcaccaacaggggtaccatggagcaggtccgggagtggaacacctgatagtaatggtcaagatagcccaatcccaatggtgcgtatctattggtgctttctcatgccaggcaccatgcccagacactgcgttttctgacttgtgagttcacaccatttccacggggagggggctatgatttttccaggtcatatttgaggaagcagaggttctgaggcttgtcctggttcatgtgtggtggcagagctaggacccatttgcaagaattaaatctgtccacagagaatgcatattgccaacactgagggatttatgaagaaggaacttttgcttccaaattgtttgatgaatggttttccagcctgggctcctctgattctagaaaatacaatgtgtaaataactgaaaatatgaggctgagttttcacaaaaatgaggttgtattgaaaccaaatcctccagcagtgacctatgcagatgagaggtgggattcaaagcagtctccttagaaaacttgatccttagaatctggcatgtcagggctccaaggaaggcaagggatgatctagtccacacccatctcccaatttacagatgaagaaacaagtccagaaagggtctggagacttgtcctggactacgtatttaatatttagaaaatggtgttcttccttttgctgccttaatcaaacagtcctacccttactcaaaacagtgctggggctcggctcatctcagagtccatgcggcaggaaccggagagaatcaatcccttcacttagtggtacattttgactttgattcaaaacaacattactgagcactccgcactcgtttcatgttccagtcttaactctgaatgacttgtgactatctgcaacaattaaatcagcccagaaagaatgcagattgtcaccactgagggattgacaaagaaagaacttttgcttccaaattgcttgaaaagtaatttccaaagaagagttgccaaggagctgttgtgcacatcagtgtcacggacagggcattcctgcccaccagcccagggcaacttcactggagagtccagcaggccctgctgggtgcattctggtatgcgtgccacaaatcagccactgaatagctttcacagaagctgccccccaagagagaagctctcctctgggaagaagctgccaggctggggtgacatttctcagcaccccacccccatctacccactcagatcttgcatctaggtttccagcagtgtaaccaatgagtagaagggctgcacgtgacttctggggcaaaggtaagtaggagaaaggtgcaccttctcttctcctgctcatttcccatcaaggagctgcatgcaaatacctcctatgccccagggagcgagtgccacaagagggaaagaacctgggtcagaaccagttttatactttagctgaacaagaaataaacttttatctcttaaacctttgaactatggaggttttacagcaggtagcatagccctaatgtggccgcccaagtcagattttaccaaaacctaaacagagacacaggctaacatggtgcctgctacactaacagcattcaataaatgtgttggtgagtaaataaatgaatctcaaggatgtgattaatggtttatttagtcaaaaggaagttaaagaatgctaataaatgacttttcggttgcagagtgtattttgctacatgctgacccctggttttcccagctgcactcaggaataaatgaggggaaattaattgtaatttctatgaagagacagccacacccaggaatggatttctgaatcaaataaggtcattttaatgcatggagagctcagaaaacagagtaaggagctcctctattaggtgaatttagggttctttgctggcttgtgggtgtggacatagagccatgtccatatactgtgtcattgccttgaaatgctgtctcctgtacatcagagctggaagtggtcatacagcacctggcctgttcttcatgtcacagatgagtatgccaaagcctgggaaatggacaactcgcccagggtcccttggtcatcagcaggcccacactctaggcaggatggtgtggattaagggtggggacagtggaacccagttgctaagctggatttttttctaggtcactttgcaagccaggggtcttcagccagtgacacaccacttgggcctcactcaaccacgctacctgctacaggagatgggaccatctccagatgggaccacccatttggcccacctgggctgagtgtggcttgcacactggttcccaagttcctgtcccatgcccaagaagaatgaggatgcactgacaattaaaaagagagcaaagtggggagttttattgagtgatgaaacagctttcagcagaaaggggatgtgggagtggtccccctacccaaaggcaggaatgtcccccctaatatggctaagtctggggcttttatgggttcagaataggggaagggcaggctgtaggtagtattgaaaaaggcaatattcgattggttaaaagtcatcattcagaaagaataaattgggaaagggtgggcaaacaggaacagaagttctcactctgggacgtgggtttcatccagtctttcaaccttcaggctgtttttggcttgaaggtggggtttcaccggggaccctcccctatctgccaaggcatttggctgcctcctgtcactgtcagttgcctggaatcaaatcctatctctgcttcttgcaaattacttaactcccctacacttgtttccttacctttaaaatggggataattggaatagttcctacttcatggccatgtcatgaagattaaatgagttaatatatttaaggtgctcaggatgggacctggtgtgtaataagtaccatgtaagtgttagtggttgtggttacattatagtgattattattaatgaattcaaattgcccctttcctgtgtcaccgttcttaagcttcagaataaagatattaaacatcatagaaaatggaaagccacagtgaatcagaggatgccaggaactcttataccaagttgtcagaacacacagcctaagaaaccagaatttgttataaaataaagtgtgaattgatatttggcacacatggagttattcattaagagtagagaattcaggccttattcatgtctcaggaatgggctaaggacagtataagtgcaccattgttcttaactgtagaaaggaaaagaaaatatgagtgtaaaattaatcctggatgagagagaatggaatatgagaagcagcccagaaaacaaacatggtcagatattgcttttctctggtaagattccaaagacattgattgttgtggatttaatattacaaagaagtttatcaggtttggggaatcctagaatgtcaggcttttagagaactgcctagaactcaagagggcttcattgaaccaagcacatatatcctctcaagttctcctgccccaaccttcattcgatggcagatctccttaatatatccacagcagatggttggctgacttgtgcttggatgctctcctaatgggaggctcagggcaccacgggccacccactggttaccagacagctctaactgttagagaattctttcctagactgggccagtaatctgctttactgaatattggccgattatccctacatttatcttttggtgtaaaagaaaataaatcttgctttctccttcttgatggtggagactggcattagaacttctggtagattgctggtcctgacattaactgagctatgagacctcaaacaagttgcttaagctctcaatgccttgccttgctttactttaccttattttcataagaggcttgtgaaggttcaggtgaataagcatgatgtagataaaacatggaggagaaagcctgttactatttatccaatagatgatggttaaaattatcactatgtgaattcagctcttgggactcccaaagccttctctaagctaaatatcccatttcctctatgatatggtttggctgtgtccccacccaaatctcactttgaactgtagttcccacaattcctacatctcatgggagggacccagtgggaggtaattgaatcatgggggcaggtctttcccttattgttctcatgatagtgaataagtctcacgagatctgatggttttataaagaggaattcccctgcacatggtctattgcctgccaccatgtaagacatgactctgctcctcattcaccttccaccatgattatgaggactccccagccacgtggaactgtgagtcaattaaacctctttcctttatagattacccagtctcgggtatgtctttattgtgagaacagactaatgcactccagctgttcctacctggcctggtggccaacccccaccccattctggttgctctcttggattgcttaattgaaggtttcacttctccctccacttgtcccatcatcatcagtccttgtccaataaaaagagaccctcaatgaagggggactcaagtcagaacaggtgcagctggctcctgaaggagtgaaaagattctaactttaggggctgagacattctagtggggaggaggcctttggggtgccccaggaagaagtcaggtcaaggcatgaacccacaggtggctgctccagggttgtggtgtgtgggcagagagaaagctaaaggggagatttcagcttttctcccagaatgttcaagccatctccaaggagcaagaaaccagtcaggattcagtgaagatctgtccacaaataagaaactatgacattggaaggtacttgctttatcttgtgaccctcaagtccctgagctcagttaacggggtgcaagaggtagcctcttgctaaattaggtttatttatcacccttgatctgggcactgcaatatcacaaaaactgcctaaattcatgccccattagtaacatgctaatgatgttattactcacttactgagtttgtggtcgctaaaacctttagatttttttttcatgagaaccacctgcaaagttttttccatgctgcatgtgtatagctgactttggaaatcaaatagggaaatttataagctgccagcacagtgtctagcttgttgtaagcactaaaagaatggtagctattttattagcagtagtggtattaatattatccttgttaggtttcatttccctggtttcagcagctttgctcattgaggttattttgagtaccaattctgtttctctctctctctccccacccccctctctcctcccagcctccagctaggctccagtttgaccagggtgctatctgagtctatcttggggcttaacttaatgatagaatctgatacagcctgagacacagagcatgcacaattagaagcagtgctaccacttcactccttcttttcatccagaaacagatccctcatcaatgtccaaaattttacaatgagaaaatttcttccctggctttagcattgtccttctctctattattcaaatgtaaaatacaaatgtctgtggaggaactacttattaaccacctaggaacttagacggaattagttgataaatatgaggatcctgggttatggagagacagtggaagtagaaggaggtgtgacatcataacaaaattatatgtatatatatattttttggtctctgtctctggttcctggcatagagttcctaaaacctgtaaattcctgagcaatgggggtgctaggtatatcttttgttctactattttttttttttttttgagacagagttttgctctgttgcccaggttggagtgcaatggcacgatctcaactcactgcaacctccacctcacaggttcaagcgattctcccgcctcagcctcccgagtagctgggattacaggcacctgccatcatgcccagctgctttttgtatttttgtagagacggggtttcaccatgttggccaggctggtcttgaactcctgacctcaggtgatcctctagccttggcctccgaaagtgctgggattacaggtgtgagccaccatgcccggcctactatttggcttttaaccctgtctcctgacacagagcttctagtccttgaggtttcctgggtgatgagagcatcttttgttctaatgaggtgactcctggtggctcctggatggcagctggtcactagaaagacgataccatgattagaagcatagaactttcagcctcatgcccccattttctgggaaggagcaaggggctggagatggagttgagtacataattggtcatgtctatgtgagaaagcctccctaaaaatccctgaacaacacagttcagagagcctccaggttgctgaacaggtggaggtgctgggagattggtgcaccccagaaggcatggaagctgcatgccccttctcccctataccttgctctaggtgtctcttctatctggcttttcctgagttgagttgtatacttttgtaataaactggtaatcaagtaacaaagtgtttccctgaagtctgtaagacaatctagaaaattatcaaacccaaggaggtggttggggtcagaagcacaggtgacaacttggacttgccattggcgtctgaagaggggcctgttttgtgggactgagctcctaacctgtggggtctgcactgatttcaggcagatagtgtcagaattgaattgtaggacacccagttggtgtctgcagagaactggaaaattgcctggtgtgggaaaaacccatatacatctggtgccaaacagagagtgttatgagtgagtgtagaaggaaaagcagtggctgggtgcatggctcacgcctgtaatcccagcaccttgggaggctgaggcgggtggatcacgaggtcaggagttcaagaccagcctggccaagatggtgaaactctgtctctactaaaacaaaaattggccaggcgtcgtgatgggcacctgtaatcccagctacttgggaggtggaggcagagaattgcttgaactcaggaggcagaggttgcattgagctgagatcatgccactgcactccagcctaggtgacagagcaagactccatctcaaaaaaaaaaaaagaaggaaaagcagtgagttttcccatacacagtgtaaaaggagataaacctgtgaagaaagggatgaacaggccaagcacagactttatttacatcccacacttgtcttgagaagttttcatgaagctacacaccaagagaatggtagctattttattattggtattattatccttgttaggtttcattttcctggtttcaccaatttagtttgttgaggttattttgcccttgcagagaagggcaaaattttacacacagagattgtagtgagttgaatggtggcacccaccccaaaatatatacccacatcctaatccctggaagctgtggatgggaccttacttggaaaaaggatctttgtagatgtaagtaaattaaggatcctgaaatgagaccatcctggatcatccaagtgagcataaatccaacaacaagtgtcttttttttttttttttttttttgagacaagttcttactctgttgtccaggctgaagggcagtggcacgatcacagctcactccagcctcgacctcctgggctcaggtgatcctctacttcagcctcctgggtagctgggactataggcccacaccaccacgccatggctaatttttgtatttttagtagaggtggggtcttgccgtgttgcccgggctggtcttgaactcctgtgctcaagggatcctcccgccttggtctcccaaagtgctgggattatcaacgtgatctgcccgcctgaccttaacaagtgtctttttaagagaaaagcagagggaggtttgagacggagaggagaagccaagtgaaggtggagacagagtttagggcgatgcagggaggaaagccaaggactgcctggagccgccaccagaagctgggagaggccaggaaggattctcccctagcactcccagaggatgcagggccttgctgacaccttgatgtggaacttctggcctccagggagaataaacttttaagtcaccaaattggtttgtgataatttgttacagcagccacagaaactaacacagagggtattttcctcctcacagtctgaaggacctgcccaggggaagaagtaaaccacctcttacctttccgaccatctcagaaccacgaggaaataggaagtgaggcctggtatgcagagggacgactcaaacaggtgattaaggaattaaccagtcacttgttggaggataatgcctcagtgagcaagaggcatcccgagttcatagcagacaaggacgcctgacagctctggtggtccctgacaagtctgacacccacggagaagcctgaggggacgaagctggcctgggtgatgggcgccatgttggatcccagggaggcaggaaggcaccaggcaacgcccctgactgggagtcatcccaggccagcgtcttcctgtttgctcaggaagaaacattcattttctctggcctcagcctcctaaactgaaaaaaataatgttgttccactctaagaatactgctgcgggctaatttattcatggctgtgacacacatagctttctttaaaataaagtccctggtgtcatttttaatagggtcataaatgcaactcgaagaaactgtctttttgcatctacctgtgattgtttctttgtatcagtcagggtagtctgggttattctgtggtaacaggcagtgcccaaatctcactgttttaaaacaatgaaggttgttgtaggctgaactgtgtcttcagatgtggtcacattctgaggtgcatatggatttttgaggggacacagttttttaaggggacattggtcattgagggaacacagatctttaagaggtaattaaattcaaatgaggtcattagggtgggcttttatccaatatgactggtgttcttagaggagaaaatgtggacacagacacagagggaagacgatatgaagataaaaggagacagtgcccatctgtaagtcaaggagagaggcctggaatggatccttccctcatagccctaagaaggaaccaatgctatggacactttgacctcagacttctaacttctacaactgccgagacaagcaatttctgttgcttaagccacccaatctgtggtacttagttacagcagccctagcaaaccagttggcttagaatgggtgtattaatccattctcacactgctctaaagaaatacctgagactgggtaattaataaagaaaagaggtttaattggctcatagttctgcaagctgtacaggaagcatagcggcttctgcttctgtagaggcctcaggaagcttccaatcatggcagaaggcgaaggggaagcaggcacttcacacggctggagcaagagaaagagatagagaagggggaggtgatacacactttcaaacgaccagatctcatgagaactcactatggcaagaacagcaccaagggggaatctgccctcatgatccaatcacctcccaccaggccccacctccaacactggggatagcaatttgacatgaaatttgggcagcaacacggatcaagccatatctatgaggaatagagatttttgcacttttcagtcattgctttctccctggttcccagaacaggattatgttctagacacttaagaaatatttgctaaattatgttgagttaatcttataataacataattaaggtcaactttggctatctgtgtgatgttagtttcttcaaaataatgtcttcaaataatttctctgaaataataattgccgatgtgggagaagctgtacttacttgtgtcactgagtcctcagtgcaattgcctggagctgaaagtggtgtcctggccctggccctgtcgtgtagcagaagatctatgctcttggagatgctgtgatataaatcaactcaagctagtttagagaatggaaggatttctttttcccctaaggagttaacaacaaagtcatggtaagtgtagggggtccttctgggccacagaaacaactagaagcagagatatttattttattttattttattttattttgagacagagtcttgatctgccacccaggctggagtgcattggcgtgatctcagctcactgcaacctctgcctcctgggctcaagtgattctcctgcctcagccctctgagtagctgagattacaggcatctgccatcatgcccagctaatttttgtatctttagtagagaaggggtttcatcatgttgttcaggctggtctcaaactcctgacttcaagtgatctgcctgcctcagcctcccaaagtgctggaattacaggcgtgagccaccgtgtctggcctagaatcagggattaaaatagcaccacaaatctctctctctctatctatctatctatctatctatctatctatctatctatctatctatctatctatctgtctgtctatatctatctatctatatctatctgtctgtctatctatctatctatctatctatctatctatctatctatctctgtctgaattctatatgtgcttctttcttcatagcaacttctttctttcctactgtgtcgtgctgcacagtggcgtcctctatatggctgggacctggctattggattctttccttagctccaacttgggtgctacctggagaaacattttgattggtctcccttgggatgggtgctctctctggtcccatcaactgtagcctgatgaccatgtactcttgcccagtgtagtcgggtgtttactctggctttattagctgtggtcaaggggacagtctatagcatagacatggccaccagtcaccattgttttaatattcattgaaagaaaagctagaaacccatcactatttatgcagactcttcctttttcttgggttcctgttcctgcttcatagttgattcctttgtcactcatcacagcctgcactcaggaattaaccatgttgtactttatactgatccctgctaaggaatctctcaaactctcagaaatgcccaattctgtgacaaagccagaccaccctctacaggtcggggcttgtgcccaccacaggctaaacagtctaggtttggccaagagcagggtttgaagaaagaggcatatcacagctgggcactcagtaggtgtcagtacattgtgttgaatgaaaggttctgagccagagtcctgaagcaggcacctgggcaggcacgatcacagggctctcacctctctagctgggacctgggcctgagctcagtccccgtgatggcccttggtgaactttctcaacatatccctttcttctcctttggtgacttcccatggctgaattctacctttactgtgtacagggttgctgtctatctcaagcccctccctgccacctatcataagctccataagggcaggcagtctttttcacaccgcatgcctgtcatctagctcactgcctggcatatagtaggtagttgaatacatgaatagggtaatgggtgatcagggcctggaggaaggtagcaggggaatctgtactagacccagagtcaggaaaggcatccccaagaaatggcattaaagctagggtgagaatagcctgggaggaggataagcacagagctccagggactctcctctctccttctctgcccagggacctgctgcaagctggcagcacagacacagccagtggggaacagcttgcagcaggcccctggacagggaaggaaattagtggcagagccaggcctagactttgactctccacactcgctgtcacagccagaagagtccctggtttggttccattccagaaggattatagtaggttgatgctttcttgaactccaatgtggttaaaatcatcaccaaacacttgggcccagtcagaggactccaactgtttgatattccatagactctcaagaggaaaccataattgcctattagtcattttgcagctggtaccaaattacgaaagacagcacactcgtgtgtgtgtgtgtgtgtgagagagagagagagagtcaaaaagtggatactaagataatgcagaatggcttagaatagttgagaaaataaacacgtaaaaagattagtaaataagaaaaccattgagtcatttatttgaattatataattgattcagaatagattaaacaccacaaatggatagagctgatgctcttaaaacccaaaagaaaacactttatccatagtgttggcagtgttggttcagtgttaatccaaatacgatatgaagctacccaaattcgaattaaagggttcttagtacagcaaacgccaggacagaataacaagaatccaccatccacccaaagctaaaaaaatgctgtgcatgcatgactgaaacccttctttcccaagtggaaacaccaacgcattaacaaatatttaatgggacttaccatgtgcgaggtactcagagaagcttccaaacttagcaaccccttttgtggctgtcctgagagatcctttcacatttactaattgcacctcagatccatttgttgatgaaaagcaccatgcagctggagatcttttatcaagattttacatcccctccctcttgctatttggctttcttttccaacggcatccaaaaatggggcatgagctcatgttcccctgtgctgccccttgttcacttcttccctctttcctaccaccattcaaggggcaggtttaggtgatctggctacagattgttcagcccagttggacccctttaagagttcttctcacctttttacaccgttggtgggaaagtaaattagttcaaccattgtggaagacagtgtggtgattcctcaaagacctagaaccggaaaaatacaatttgacccagcaatcccattactgggtatataccaaaagaaatataaatcattctattacaaagatacatgcacacatgtgttcattacagcactattcacaatagcaaagacatggaatcaacccaaatgcccatcagtgacagactggataaagaaaatgtggtacatatacaccatggaatactatgtggccatgaaaaggaaaaagatcatgtcctttgcagggacatggatggagctggaagccattatcctcagcaaactaacgcaggaacagaaaaccaaacactgcatattctcacttataagtaggagctgaacagtgagaacacatggacacggggacggaaacaacgcacactggggcctctcagtgggtgggagaacattaggaaaaatggctgatgcacgctggacttaatacctaggtaatgggttgataggtgcagcaaaccaccatggcacacgtttgcctatataacaagcttgcccgtggaccccagaaattaaaataaaataaaaattttttaaaaaagagttgtcctctgcctgagcaacataggagaccccatctctaaaacacatttcaaaaattagctgggcatggtggcatgcacctgtagtctcagcaactcaggaatctgaggcaggaggattgcttaagcctgggagtttgaggtcacagtgagctttgattgcaccactgcacgccatcctgggcaacagagtgagaccctgtctctaaaaaaaaaaaaaaaaaaaaaaaaaaaaagttgtcaagccgggcatgttggctttcgcctataatcctagcactttaggaggccaaggtgagtggatcacctgaggtcaggagttcgagaccagcctggccaacacggtgaaaccgcatctctactaaaaatacaaaaattagccgggtgtggtggcacacgcctgtaatcccaggctactcaggaggctgaggaaggagaatcgctggaacctgggaaacagaggttacagtgagccaagatcgtgccactgtactccagcctgggtgacagagcaagactccgtctcaaaaaaaaaaagttgtcttgtggcctagaaagttgtccctccactacacagagtccctggaggacatctaggactcaaggactcccttaccataaaatgacacatctgcacagagcagtaatttgatgaatgagtctctgtgactcccctgtagactcacagcattgcttctcaggccaagttctggaacatatcatcctattcccccatccatactgccctctgacaacaagtatctgaaatattttggcctagattcctatctcaggcagacacctagaattttagaaaacatcaagttgagtattgttgttagaggtggcactagacatttagcaacccagaagccaaacccacaagggaaaggtgtgaccagggaccacgcagtggacaagtttcagtgactgatggaaagctcgttataaccaaatgacatctcttcaccaggtgtagtggactgaataatggctttcaaagatatcaggtcctaatctctgaaacctgtaaatattacatcatttggaaaaaatatctttgcagatgagattacattaattatactgagatgagggagattatctggattagccaggccctcaatgcaatcacatttatccctgaaagagaagaccgaggtagattttacacacacacacacacacacacacacacacacacacacacagaggagagggtgatatgaagatggaggcagagattagagtgatgtgtccacaagtcaaggaatgcttgcagctcctagaaaccaaaggaggcaagaacagattctctctggaacctccagagacagcatggccctgccaacccttgattgtggcccagtgataatgatttcagactgctgccttctggaattgaaagggaataaatttttgttgttttaactcacctggtttgtggtgctttgttagggcaggcacaggaaactaacacaccaggtacagaacataaagagaggcgtcatgtgtgagagacatgcctttctcatttggcctttcccagaattaggtgtggctggtaaatctcagtgcttgatgtcggatattgattgcataagacatgcgagaatgacgtgagaggctttataaatccaatgagtcaaccagggacgggtggttggctgtggagacgtctaggtaagctgcgaccatgaccgggttaagctaacacttctgtgagaacacgtgcttcatacaaacagtccagacagacctagaagatgtgatctcctaggtctacaaactcctacaaagcaggagaccactgagatattaggttggtgcaaaagtaattacagttactgccatttaaaagttatggcaaaatcacaattacttttgcaccaatctaatgtaatcacagagctgcaacagaggttagtgctcacttccttctgcccatctgtgtgacaaagtcccagggttacacagccagccaggagggagcctcccctggcacccatgagtctcatgactcctagtttcctgttggctttctttctggctctgcctatctgctatggacctgtcattcatgcaaattgggtgcctctgtttctcgggagctgtgtagagcctagacaagttcaaatcatcccaaaggacttagagtaggtcggaatcaacataatcaatgcccctgacactgcccctccacatgccctacaggagttgggagcgcgcacctccaccctatattgttgtctccaaattcttctctcccttcccttctctcttcttccctgaggtcagcctcacattctgcaggtctagcgaaagggtgtctcacctcaatcatgagaaagaggagtcccagctccaggagaagcaggagcagcccaggaaggggcttctcagaccctgagaactgagccatggagtggccatgtgctgttttagaacacagctgacaggacaccttggctcttcttcaccagagactaaaatcaagagaagcatcagaagttttggagttctcactgttcttgccccagggccacagagcttcagctacctgctcctcccacaagatccagataactctcagccaccctagaggagtccttattcttctaggcccccaagggttctcaagcctagacacattaaaaatacctgagtatttttaaataatcccaatgcctgagtccctctcctacagactctgatttatttggtctggagtggggcccaggaatccatatatttttgaaaaatcactccaggatattctctctctctctttttttttttgtactttatttattatttatttatttatttatttatttccagagagggtctcgctctgtcacccaggctggagtgcagtggcgtgatcttggctcactgcaacctccacctctgatgttcaagcgattctcctgcctcagtctcccgagtagctgggattacaggtgcctgcaactatggccagctaatttttttgtatttttggtagatacggggtttcgccatgttggccaggctggtctcgaactcctgaccccaagtgatctatccacctcagcctcccaaagtgctgggattacaggccactccaggagattctaatgtgcaagcaagattgagaactcttgagctgcctggccttcagactttttattttgcatcccctctcagcaaatcatgaaaagccttgtcccctggcatcacagcttaaataagttaaagtagttgcatggaatattatttctgacctattatacataactatgaacatttttaaacaaagccattttaaatgtattaataaacatatccaatgatatctaaacatcatagtgatttgatatctattatccatttgaaaatacataaacaagccgggtgcggtggctcatgcctgtgcttccagcactttgggaggctgaggcaagtggattacttgaggtcaggagttcgagaccagcctggccaacatggtgaaaccgcatctctattaaaaatacaaaaattagctgggcatggtggcgggtgcctgtaatcccaaatacttgggaggctgaggcaggagaatcgtttgaacccaggggacgtttgaacccaggttgcagtgagccgagatcaggccactgtgttccagcctgggtgacagagcgagacttcatctcaaaaaaaaaaaaaagaaagaaagaaaaaatacataaacaagctcctttatagtagtctaaaattttacactacttttttttctccttgagctcatattttcattgcctttccctaatgtatttttctaatgtaatatatttttatactccaatgcctgttgatcatcctgttttatttctctgccacaaaaatatctacataaattgaaaattttatacataagacttttattctgcattcttaagccctaagtgttaaaatatttcttcttggttatcatgaatgtcactagtagtacccattaatcagcattatataaaaatatcacgttattaaacatgaatacaatttttaaataggaaaggtaaaattgcattttaaatgaatttctcagtgagctagatgagtatttgttcgtgttttccaatgagctcatgtatgtgggaatgaatgagacagagttagcaacagttttattttcatccttagttttatagattcaggtgctggtaaacattggcttacacaaataagtaggaggaaagagaaaaatttctcttatattagtagcactcaattctctaagctccttccaaggtatctgccaaaaatcatattttccatctgtcagttgacagctcaattaagtactccttcaattttgctcaaggcaaggaactagaaaccatttgacttgcagaaggatttgttactcagtcattagaaccactaatttctcttactctctaggaagtacaccaaaaagctttaccaagacttaccaagtgattcttaattataagtttctttggaagcatattttcatacctggtatattcagaaaaggttgaaaagcctgaaatatcattaatttcaattcttgtttatcaacgtaatttaaaaatctatactttttaaactacgtgctttgtgggctcgccccaccctgccccccagtttcagtcattcaacatacagaaaatgtctgccgtgtaatcaaaatagcaaggccaggtctcactgtcaaaacaggcttactttctgttagaaaatgtccagctttgccaggcacagttgctcatctctgtagtcccagcactttgggaggttgaagtgagctgattgtttgagcccaggagtttgagaccagcctgggcaacatagtaagaccccatttctttctttctttctttctttttttttttttgagacagaatcttgctgtgtcactcaggctggtgtgcagtggcacaatcttggttcactgcaagttccacttcctgggttcaagcaattctcctgcctctgcctccaagtagctaggattacaggcacctgccaccacacccagctaatttttgtatttttagtagggacggggtttcaccatgttggccagtctggtctccaactcctgacctcgtgatctgcccacctcggcctcccaatttctacaaaaataacatttagccaggtgtggtggtgtgtgcttgtagtcccagctactcaggaggctgaggtgggaggatcccttgagcccaggaggtcaaggctgtagtgagctgagatcttgccactgcactccagcctgggtgacaaagtgagaccctgtctcaaaaaagaaaaaaaaaatgttcaactttattttttaatgcaaatctttctgttgacttgcgtcctccatgatggcatccttgcattcctgactgagacatggacagctgggccatggagctccacccaccatgaatgtctgggtgacaatgtaatggggtccaggtgaagaaaggctcagctctgtcagggcatctgctttgtgcccatgggctccaccttaggagggctgccatctttgacagccagggcagggggtggcttatggtggaagaagggacccgtgtttgggtgggttctccaagaaacagacccacgatgagcttacacatgcagagacttggcatgcaaagattttgttagaggaatcaaggatgagagaaagcaaaggtggggtggtggtgctgaggaaggccgggaccggtcagatggcagtgtgagtgcgaggctgcatgaaggagagagggtggaagcatcccaggctgctgtgcaccctcaggaagtttcagcaaggccaccagggaattcgcgagtcaagtctggccatcggaggagtcccgagtctcccaggagcagatctgcctcagtttcccagtcgcattcagtggttggctgagagcagctcacggtgatggaatcatgcacatttgtgccagtggatttcagaaggcaggaactggggcccctgagtcaatttagccccctggagctggaattctgtgaggagccttctcatggccactccaggaaatgtttgaatgaaacttgtcaccacttctgccaccctggtctttaacagatgtgaaacaagagcatgacgacatggacaaaacaccgtggtttgtccattagccacaatgtacttaagatggaaccaatcatgggctcgtagtatcttgattaaagaaggctaatgccaatgtttcacattgttattgtttggcacctgggatgtttttaacacccctggggcaatgttcatactcagacgctggagaggtgaaagggatctcttcattttgcacggtgggacaggagagattataaatgggcagaagggaaaggactccttgtacataaactaggacatccctgtgtagaggttcccatggacatccccgaggggcagtgtcagtttgggtcagtctacttcttaagaagcagacactaagatggaattagacacgcaagagattgattgactgggggacacatctgtgaaaggtaaagagaacgccttcagagtacagctcagacctgatacctgtgggaggagtgaggggaggaaggaggcctggggaggagcaatctcagggaagcccagcagatggagatcttcaaggcaaaggagcattcactctgctcagtgatggactgggagcagcttgaggagtgcagtgggggtgctgggggctccctgtgagggctgaaacagatcagaatatgcagaacgcagtgcaccagtttctctctatgcggcaggttgccttgaagggagatcagagcagcgtactttgtagctgcacagtattccctcttggggacatctctttcctcccattgcctccttctccctctccccacactgtgtagctccttagtctcttctccttcaggcctcagcatcccctctccctggtctgtccgactctcccccacctcagtctccatttgtgtcatgaaaaatctatgggccccatccaggtgcacaaaagtcacagccaggctctctcctgcccactctgctgtggaggtggaggggagagccctgagccctgaggatggaggcatggagaaaagaaattaggatggtcttgactcaaagtgacagctcacttttcttttctctttctgattttcctttgtcagccttggacatctgaaaataaactggtcctctggcaccatgagggttaatctctgccattaacttcccctggcctgcaagagatgtccttcctgcaggcacaacagtgggacaacatgttgctaatagagagtcagtaacctgaattgcattacaaaacagctccggtaaattagccttgggaagtgccctgcccacttgctgggtatatttttgcttgtatgtagcaggcagaagagggaagggctgtccagctcccaagcaactcccgaaactctgtcttccattcggaaggctggactttgcatcactcaactttgtttcttttcacacattcccgattctaaccctaaatagatttaatacaaaataaaccccaccccagattaaaatagtatattatttgtgctttatatgagtctcagaaattactttcaataatctctgtataaagttttaaaaccctaaactagagttaaacttgtggaaaagaaaggaagaagtgaatggttaacaccaattcacagtaggtattttactttgtaataatactgctgaatttctttctttacaaaaaaaagcatgcatttataatccttgatgatcacaacaaccccttgataataaaattaagtttatgacatgcattactgaaaactttaaaatgaggcatctagagcccagagtgattaagcaacttactcaaggtcacacaggaagtgattaggaaagctggaacaactctttggccttttggatcagacctctatgctgaaaaagaatcctgagtttcaagtctggaagatgaggaaggaagccgtgatgtttggagacagagtgtgccttctatagctcaagataaaattctgttataggaagaagctcagatttcttaaataccaagatttgatcccaagtcaatgaccaataaaagcttattatctgcaaccatgtcagactctggcccaagagtttaatctttctaatcacatattctatacattattcgagaaagaaaggtccggaaaagcatccctaaagactcaaatattccaaggagcaaaaaatatagataagacaaagctccaaagactcctaacagtggaaatagctgtcagatgttatagagaagggagctgatgggttcccacatgctattaacaaaccatgaagaagtcccttagcctttggacctggagttctcaaccctggctgcacattagaatcacctgggaagcttctgaaactcccaatacccaagacatacccaggaccatttatatcagaatcttccagcgatggaagcctggtgttgggaagtctttaaggctccccagctgactccaatgtgtagccaaggttaagaaccatggctctaggacctaacacataagttgaatgaatagacggatgaatgaatatcagcaacagaattgaaaaaagaagaaacaattaagaaactaaatttgatgttatttactcagatggaagaccctgaggtcctcactcaaaatgcgtatgctgttcacgcagaagcagttctatgaagtttggatgtcaagattctcagctcacaacagggatgagaagagaagatggttctctgtggagcagagtcaccaacaatagcaggaaggacaaatgtgacagcctgaaagacaagtaagaaatgcaaatcctacttctatggttgaatgtgtccccctaaattcatgtgttggcaactgaatccccaatgctagttttgagaggtgggtggtgttaatcacctttaagaggtgattaggtcatgaggctctgcccttataaatggattaatgtcgttagggtgggagagggttagttatcgcaagagtgggttcctgataaaaaaggatgaatttggcatccttcccctttctctttctcacatgtactctattgtccttccaccttccaccatgggatgaccagtaaggccctcactagattgtagccaccttgacctgggacttcccagcctccagaatgtaagagataaatctttgttctttataaattaccgagtctttggtattctattataacaacacagactaagacacctataaagcaggagacagaactcagcgaagagttgtctggggccctttaataccagggtaaactgacctgcccagcccagtttccctggaggcgtcattgtattagcagaacagtgcagttaattggtgttcgggtgcctgagtcacccagcggaggcgaagttctgttctctctacactgtgtaagaactcacaggaggatgggcagagcactcgacttcctcagcactggctatcacagactgcccttactagaactgcgtctgtttttgaaagcctgggtgggtttaatagttggtaaaagcagcatgttaaagttggcagcagaaactgcctcctaagagaatcacttcctaagaggggaatatgaaatttctcattgaggcaggctgtccccttctgtccctttgtcagggaaagcctctctctgggggaaagcaaaggtggagctggggtgcatagacctctgtggagagaaaacctgaatttggcaaagtggtcctcttacagatttcttagtctgaggagttaagctttttcttggttttgcaaattcagtgtctcttttggcagacatttgttattagaagagatctgtactttctcagcagggagtgacattgctctgtgtccttaagatattgcctgttctagggagttgggtatgttctccaacaagctggagacctagatctgtatttccgtgggaacaggaggcctctgcagacttgaacttgacctcacactaaaggaaagcctgtgcgaaggaagaggacaatcttagaggcagtcatttaagtctgagtgccccagaacacagggatgttgggtggctactttctggtgccatttcatttgtcccactcaaggccataatgcaagcttggggaggaggaactcccctgagaaaagagaccatccctgctgataatcctactaacctgattctaggtcagtaaatgaaaacttgaaaggtgaatttcagactggagaaggcagcggggaaagggactcaagtccgtttttctcggaccaatggcagtgtatggtaatgtggggctagccctgacatcgggaagacagttaagagccaaacatggtgaggaactctggggctgggtcaaggctgggtcaaggctggaagctcagagccacatctatttggaagtatcagctgttctttgggttgtattttcttttttctgtcccctgaacaatatatcaaggaagtttggctgcaagtaactgcctggtccctgagatgctttggggagaatggggaaggcaggtctggaagggagcacaaaagatggcaagagagttgctatgagcaggggtcaccagcagagggcagagggcagaggtgcccaacggagcagagagtgctcaatggccatgggcggcaaagggtgcagtggggtcgcagtcaaaatgcaggctgagggggacctgggcatgtgggcaacggcatcatggcgctcacagaactctttagaggatacactgaagggcaccaatccctgacaattagcaagtcaggatcgaagccaacataattcgagtatttcatggaaacaatatctaactacaaacagctgggtcttcaacaggtgggaaacactgggaattgaagacttgtgttcagaaattctatctaccagctcccagccatgggacttcaggcagttcccctgcgccacccagtctcggtgcctcatacgacaaacaggtgcctgacatttaccctacagacctcttgaggttgttgttttaagtagcaaaggcaataaagctcacgtatattttgtaaatggtaaaatactttgcagacttaacacactattttatcttggaaagtttttccaactgaaatgatgaaccaggttaaacattttttgacttttacctgtgatcctaacaggcactctgggggattctatctggcaagtgtgggaaacacagctggcatctctcctggtccactggcctcccatggggggaaggacagtccctaggaagcagcccatggatatagggaggaggtgtggggtggcacactcatctctgacttacaggaaaaacagaaactttctctaaagcaaataaaatgcagaaaatgcagctcagcatataaccaagataaccaagcagagaaaaatatttaagtcacaaattggcagtttaaggagtatcagcattctgagggaaaattcaggagacagctgatgaatccacaagttcttactcaattaactttaattggctagtatctgataggcagctgttttaggcagggcatgatggaagttataatgttaaacagaaatagatgtcagctttgcccttagggaaccatatatatatatatttgtttttgtttttgtttttgttttaagagactggtcttgctccgtcatccaggctggagtgcaatggcatcattatagctcactgcagcctcgaacttgtgggctcaagcacactgcagcctcgaacttgtgggctcaagcaatcttcctacctcagcctcccaagtagctgtgactacaggtgtgtaccatcacccccaattaatttttaaaatttttgtagagacagagtcttgctatgttgcccagattggtctcgaactcctggcctcaaatgatcctcctgcctcagcctcccaaagcactgggattacaggaggagctgcaatttttgagagagaaaaattgacatgtgcaagagcagcaacaggccaaacatgagccatgagatcctacacctataccatccaatatgggagcaggccatgagccacatatgggcagtgaactctagaaattcaggccactttgagaggtgctgcacatgtaaaatacactccagagtccaaaagcttggtacaaaaaaagagaatgtaaaatgtctcattaatcaatttcacactgattacatgttggagtgatatttttagtatattgggttagataaaaaatattagtaagttttttttaaaaaatgcttttcattaaacatcagttatctgatacatttatttatgtgggatcctcctacccaaataagctttaattagatgttgttgtgctcctgttaaattcaattctgtggagtttagcaccactgccaagagcctccttcttagcacgtctcttcttcctctttagcggcagttctcaaaatgtagttagaaggcagagactctgttttcacctgaatttaatctaaatctgattccaatcaagatccagataaaatgcttgttacttatctcagcagctagtttcccagattcagggagtaacataaaacacctgcctagcaatagcagaattctaatgttttgaatgccttgggccagggacacttttgtcactattcagtttcagccatcaatgaaaactccttcttcttagctacctggtatggacggttgactaactggttgaaaaacagtcaacagtctggttagcgtctttgaagcttcctgaggatgtgtaccactcagtcataccttcaccgtgcttacaagagcatctgttgtgtatgtagtggctgccccacaagtagttgtattgataaattctaaatgttgctattctttttttttttttttaaagagtctccttttttttttttttttttttttttttttttttttttttgagatggagtcttgctctgtcgcccaggctggagtgcagtggcgtgatcttggctcactgcaagctccgcctcctgggttcacgccattctcctggctcaacctcccaagtagctgggactacaggcgcccgccaccaagcccggctaattttttgtatttttagtagagacggggtttcaccgtgttagccaggatggtctcgatctcctgacctcgtgatcgcccgcctcagcctcccaaagtgctgggattacaggcgtgagccaccgcgcccggcctaaacgttgctattctttagaaaggctaaagtccagcccctgaaagaagcctggaggctaatgttttctctttcaaatggttagtgatgaaaactgaaccctttggagattctgattttattctgcttataaaagctaaacttgaacttcactggatagggtggattgtatgcaggtcctgataaaatccctacacaatttccctcccttctaggctgacctgccgtgcctgcagcccacaagccacccccttcttttcccacgcatggcccaaagctacgagctctcagagtttttccttcttgcagcacgagatgacacaaagataggttctggcagttgcaggtacgttcacctcagcaattctagaaaatgccttgtaattactaagcagaaagcacacaatctgagggggctggagaactaagtcttcacataacaaaatctgcttctatatggcattttatatcttccagtgtgatggggaaatgggaacgctttgaacagctgaccagatgaattttaaacaagaattggtaaaaattggactattagagattttgagcattttcttgtggatttattggccatttgtgcatctttgtgaagtgtctgttgaggtttttttctgccattttaaattgggttgtttgtctttttattgttggcatgtatgcattctttaaaaattgagatgtaattaaagcctaaaagcattctttatatattttagatacaagtcatttgcgaaatatatgtgttccaagcatttttttcccagccagtggtttgtcatctcttttcatgagctgaaattttacattttgataaaatccaattttttttatggttagtgctttttgtgttctgtccaaggactctgcccaccccaaggtcatgaagttattatgctttatttgagtaattttgtggctgtggttattacatttaggtgtatgatctattttgaattaactttgataaatggagtgagatagggattggagctcatttttttccacacatatatccagttgttccagcaatattgttaaaaagactttcctttccccattgaattagcaccaacaactggaaataatccaaatgtccagatataggtaaatggataaacacattttagtctattcagtggaataatggaataataaaatacattccatcattggattctaattccagtaatagaatacattcatggaacaatgaaatatattcagcaaatttttttaaaaagcaaactataaatacatgcaacaagctgaatgaatctcaaagacattatttgaatgaaaggagctaaaagcaaaagagttcttactgtatgcttctacatacatgaaattctaaaacagacacaactgattctatagtaacagaaagaaaatcagcagtttcccggttgagggtagggatggaaacttttctggcacgatgaaaatgttctatatcttgttttgagtgttggttacatggacatttacaattgtcaaagtttatttgtctgaaacatctaagggctacacgtttcactgtgtgttaattacacctccatttaaaatatattaaagaaaaaaaaggattagaatgtgaaccttcctggactgtaccttacaataaatagcgaaattcctctctctccgcagatgccttgctgttggaggctgggaaaggaagatgaaatgtgcagagcccttgacttctcccttttcttaagactgtgggataaatttttcaaaacattggctaggagacttgcattcaaaaccagctgagtaaataatggggctttggtgagttgttttttcccttctgtgtttggaaatttgagcctggtgtatctttttcaagcacatctcatttagaggataatttacatttgcacaaaatcatggctacagcccatctgctcaacgattatgtaagatccaacactcattagagtgtgacatgcattgatcttagtgagcatatgaacttgtgtgcttgggattcaagttcttctaaaataacttccagcaccaaccagctaccatagcctgttgtttctgacattttccttggaacatgacagttaatatccatttgaaagaaactaaattattggggggctttaaattcctaatggctatagcagattttctggtagagttaagcaagattgagttggcagttgtgaaagggcggaggctagaaggagagctgtttgttttttgtacctgatggttttatcaccaaagagtatttgtaataatgaaacagctggagcagtaacatgattcatattaatatatgcatgtaaatgggttaggaatggaattaacataatttctgtgctctggttttcccttagaagtggagactactggtttatttacagtctgcaatgagcacagccaggcagttctgctgctggacagatggcagggaaggccaggccatgtgctgtggatcagggggtgaatgtgaacatgacggtggatggcacagctctgcaaaggggctggccagaagcagagagcagatgaaaacaaaggttccttttgtctcccagagttcttagcccttcccatttagtccctttgtcctagttcctcctgccagggctttgcagagaaggggagtggggagatacagggagaggccaggaccaggggttccaaggcagaacctcgtgggaggaagtgaccagaggaggggctgcagtcactagactcagggcactggcaggaagcaggaactgtgaccaggtgagaaggtgggctcagagacactggagaggaaggacaggtcgaggaaatggtccacaggccagtcagcctctcaaagctgagggaggcaggcagtgagagggcccaggaaacaccctgctatcaggacagaaatctggccgggggacaggaagttgagtgtgacgcaccaggagactttgaagcctgtgataccaagaggaaatcctaggccatttagcaaagaacagaatttggccccacgacacagaggcccttgggaggaaagtgaatgcctaaatagaaaacaggcctggggaggccactatagggtggtcttctgtattttttccctctccgttttccattataattcatctccttccaaggccaggttcactcccacgataagagaggcaaagcccctggtcagaagggaagaagcctccatccccagcccatgtctgtctgtctcatttgtgtgtgtgtgtgtcttggggggaagtgaatggagaaagataccggaagtattacagtgatggttgtcccccatgtgggaacatggagtaagagggaaagtcatttgaggaactgcccagctgttctccaccatggctgcaccatttacattcccactagcaatgtataagagttacaatttatccccatcctcaccaatactttttattttctgtctttttcatcttagctatcctcatgagtgtaaaattgtgagtttaatttatatttttctaatgactaatgatgctgagcatcttttcatgtgcttacaggctatttatatatcttcttagaagaaatgtctgtttaaatcccttgctcatttttaaattgttttttaaaaattgttaaattgtaagaattccatgtatattctggatacaaattcctagtcagtagacaatgtgcaaatattttcttccattctgtggggtgtcctttcactttcttggtagtgttctttgaagcacacacatttttaattttgaaggagtccaacttaactatttttctttggttgcttgtgctttaggcatcacatctaagaaaccattggctactccaaggtcatgaagatttatgctcatgttttcttctaagtgttttatagttttatcttttacatacaggtctatgatccattttgtgttaatttttgtatacagcgtgagatggagttgaaaattcattctttagcatgtggttatgcagttgtcctagcaccatttgttgcaaagactcttctttctccattgaattgtctttgtgaccttgtcaaaaattaattaaccataaatataaagatttgtttctggactctcaatcctattccattgatctatatatctatccttaggccagtatcttccagaggcaaaagatcatcagggtggcttttagcagtgggaatcccagaagagcccacaaggcacccaatagacacagtcgtttcagagagtgcaaagccagctcacatggtaccagtgaaggaccctacaggtgctagaggatttctggatgcaccatgaaaaggggacaggacccttagaggggaatagagtagacttttttctttactccccattaccaacaaggtgggggcaagcctttgcactcagcagtaacttgagcacatgagttttgccctagacattctaaagtgttgtttagtgacatagaggatatgtataggacttgattacagttttgctttgactctggccataagtacttttctggctacatcttactcttgcacttgtcctgccttgtcttcccagcagatctcagactctctatgcctgcctctccctggctccatgttgcactggggtccacagttcagctcagccagggtgtgtgatggccaactctcctcatgcctccagccctcccttgaccatctccactctgatattcccagaggcactggtttcctggggctgctgttagaaattaccacaaacttagtgccttaaaacaacacaaatttattctctcacagttctggaagtcagagtttgaaattagttttattggatgaaagtcaaagtgttggtagggctggttccttctggaagctctaagggagaatctatttccttgccttttttacttctagatgccacctacatcccttggctcaggtccccttcctccatattcaaagcggccatgaagcatcttgcttctatagttgtatgtcttctgtcttatatggtcaaatctccctctgccctcctcttgtaaggacacttatgattacatttaagacttggataatccaggatgatgtcttgatctccagctcaacttaatcacacctgcaaagtccctttgctatataaggtaacactcacagcttctggggactaggacaacagggcattagtcagctttccacaccaggtgggatgcgtgcagctgtactggctaatcagagctgatgcctgttctgactggttgggttctgtgccaggtgtctatattttacttcgctctgagcagttatcaaatattttgaatatgatccttgttgtcagccttctttgttaaagagatgagtagacatgaatctgtagaagcctggggaaacaaagtgtgaaaccgattggtgtcctcctgtaaaaaaggcaagcgtgagtcaagaaaaggaaaatcatacaatagaaaagtccagggacaggtcagtcatatggatctgaaatatctgagatggttaagagaaaagccacagaaaagtgaagagcaaagtgtcttggcctgctgagcgggtaataaacaacagagagcttcctgcagtttcaatttaacctgaatcccacgtggagagacagcctggagccaaccaagaagggcttgtttctgtgcaagaaagatatggtagagcctagggccagcctggaagctggactccggatgagactgaacagaatgagctagaactgagatgcaaatgtaggacatttatttcccacacaggtccctgaacctgtacagcaactcctgccttcctttggtggcattgcctcccagagagtaatcactggatccatcagtcacacagaatcattccggagaatggaggttctgggcctcttcccataatcatcagactctccaggggtgggattctggaatctacattttaataagaacagataattcttaacatgctaaagttcccaggcaggagcactttaactgttatatttaggagacttaggagcataatcttttcataggattctgtacaaatggtttggagtcagccatgaatgcaagtgaaatagtcataaccgtcatggggagagaccccatagtcatgtgagacgtgaaggtttctaccgcactggccaactgtgattgattgatggtggatacctggatcatggtgttgagataaatgatgaggctttgcctgagctgggacaggaagagagcagcaattaattagtaatgtctgccatggctataggttggagatggtggttggtggtgaacaagtgcctcctatctgccattttctcctagaaagacctcactgtaccttctcattttatgatgagatgaaatgtacatacaaaacactggatagaaacatacatgtacagtttgaagaacaaaaataaaacaattctttaaaaattgtctctagtgagctggttccaacatctccttgggtaacacgttgcattgtctcacaacttgcttaatgtctaatttaaataaatcccttttggcacagtttaagtccagtccctttcattctatcctcagagaaaaacagaacagctgctcctgctctcctattcaatatgcttccctattttaaagaattcagttcttcagaaaaaaattaatgagactcttctattttaatgagttacttgtttggtggattggcacttttcctcccccaagctcaacattcttggttacagaaatgaattagaatagaacattgagagtagaaggaatttagatgtcattcaattctctgttttcacagatgggacaagaggcccagggaaatggaggacctgacttgctcacacagcagaatcagaactaagacccaaccatcctacctttcagctgagagtaacttctaccagatcacgatatttggatacgcagtgtgttttgaagttggagaagaaatccaagaccaaacacgtattgaggtttattttccatcacctcagtggcttccattctccagcttctgagtctttttgtttgtttttgtttttttgagacatggtctcactttgtcaccaaggctgaagtgcagtggtgcgatctccactcactgtagccttgacctcccaggttcaagtgatcctcctgcatcggccccccaagtagcatggactacaggcacatgccaccatgcctggctaatttttgtatttttagtagagatgaggtttcaccatgttgcctaggctgttcttgaactcctggactcgaacgatctgcttgttttggtctcttaaagtgctaggattacaggcatgagccactgtgctgggcctggcttctgagactttttgccagagggcttcagacccacacctggggcaggccaaaagcactgggggcttcattccccaggagcaatgcttaaggagtgtgggtcgggaatgggtggataaatgctcctgattcttcaccgcttccttgatgtcgtgattctggggtatgtgttccctggtgactcagaggctcctcagcagatctgatccccagttgcccaccccagtgactctctcgttaatgtacccttcatgaacttccctcctgccctctatcctttccctacttcctcattatgctttctgagattatctcccaaataaattatttatacccccatccttccttccggaccttcttttggggaaatgagaacatttccatacttataagaccatacttataagaaaagagcataccaggaagctcgaccagagctgtgaagccggaagtttgcctgcgaatggatttccaatgctgtaatcctcaggatcagctttgccactcacagagccaagtacaaagtgaaaatggggagtccctggttgggaaagcactaagactttcaagatgatgacagcagagcattaaaccatgggcagaggccaggcatgagggctcacgcctgttatcccaggactttgggaggctgaagcgggcagatgacttgaggctaggagtttgagaccagcctgaccaacatggtgaaaccccgtctctactaaaaatacaaaaaattagccggtcgtggtggcatgtgcttgtagtcccagctactgggaggctgaagcaggagaactgcttgaaccagggaggcgggggtttcagtgagccaagatcacaccactacacaccagcctgggtgacagagcaagactctctttcaaaacaaacaaaaaaacaaacccacagcagtgctctcctgagtatgcagcctgcagcgtgagtgactacacaggttgcacagccatgaagctggccccgctaatctctctgtaagaattactgtaacactgatgacaccatttgctgagtcattactgtgtgccaggcaatgtgttggactctagattgcatcatgaatactgtaggggaggaaaagatttttttcctcgctcaccacaaggtttatggctgaggcctttataacaagacagattaaaccatacacatttgtttagtataagtttcacatgacacagaagcctttaaaactgaagacccagccgggtatcctggtgtatgcctgtggtcccagctagttgggaggctgaggtgagaggaccctttgagcctgggaggtcgaggctgcagtgagccgagatcgcacacctgcactccagtctgggtgacagagtgagaccctcagtcaaaaaaataaaagaaaaaaaaaagaaaagaaaagtcatcagtacccaatgatagtcactgtaaatattgtgtttcctttcagtctttgttgttgttgttgttactgtgtactcttttacatctacctttatcaaagctaagatgataggcagcctttttcatttaacagcagtgttaaattagtatattcccattttattgaagttttttgaagaccttttcaaatagcagcttattatgcaacgtgtgaacagtaatttaacaattctcccattcagagatgtgtaaatttgtttctgttttttcaatttatcaataatttactggcacagccttgcacccctgctgcagtgtaagacagtaccctgtgaccttgtctcttttagcattggtataaaattttaaaaatttttttggataattttataagcaatttataatttataatttttatttatttattttgagaaagggtttcactcctgtcacccaggctggagtgcagaggtaagatcacagctcactgcagcctccacctcctgggaccaagtgatcctcccacctcggcctcctgagtaattgaaaccacctggtgtgtaccacctcaccaggctaatttttcttttttgatttttttgtagagatgaagtctcgctatgttgctcaggctggtcttaaactcctggactcaagcgaccctcccacctcagcctcccaaagtgctaggattacaggtggaagccaccttgccttgcctgaaggcaattttttaaaggcatgtctcagagaggagttttgagtaatggcctaatgtgttggaactgagagtatgtaacttcaccaggtggctattttaaagaaaaccacagacacctggatataaaagttttgaaatatggatttttaaaaacccatctatgactttgccatcatccccgtagttaatactgtaaatgatcaatgacagaagaaatcaggatgttatgagcaggatcttcagtgtttgtaaggaaacctgcaggatgtgtggctgggctgaactgtgcccaagcacactttgttcagtgcagtttagaaatggcttgtgatggttgggtactgtgttgcctttgctttatgaacactttagaaagctttgcactgtgtggtaataagtaggtttttcttctttttctctttctttctttcttttctttttttcttttttcttttttttcttttttttttttttgcagttgcattttgttgttgttgttccctcatttgtttttgttatcttgcatccaaatacccttcctcctcagcagcaatgttgaaatatcaggcaagtaggtgttacaccccatgatgtgaggagaagggaggcagaggttccctctcactactccttggtgatgagagatgagcttagacctggccaatcgtgttctccacccgggactctgactctcaagaagtgatacaaagatacagtgaagattgacccctgccaaggcagcaggtgttcagtggcccgtgggggaacgtctgggggtggggctgtgaggcagtggcagtggcctagcagatggtccctctctgtggattttggcagtgttcttggctgctggtgctccttttattctcaacccatttccaagccatgctcttcaatgttcccattaatttcatacaccctttccatacatcgtgtttcctacttcagtttgccagagttgacttgtgtttgttgtcaccaagaaacccggactctgctccttgtcaattatggtgtttattttaatttgtttctaaaactaagtatgaagaattggtcaggacctgtatttctttttgtgtgtgtgtgagacagagtctcactctgttgcccaggctggagtgcagtggtacaatctcagctcactgcaacctccacctcccaggttcaagtgattctcgtgcctcagcctcctgagtagctgggactacaggtttgtgccatcatgccccattaatttttgtatttttagtagagacggggttttgccattttggccaggctggtctcgaacgcctgacctcaggtgatctactcagcctcccaaagtgctgggattacaggtgtgagccaccgcgcccagctgcaaataccatttttatgggaaaataagatgggccccaaagcaccttgttaaggatcataatctggcataaacacagcccatttgtgaactggaagcacttgtcttcactgccttttgtcaatactaaatcccattgtgtcttcatgtttttttacacagcccacatttcgagatttactctttaaaaaaaacccaaaccttgtgacatctttgtgtccacatcctttgccaagaactctatgctcatgttcttcacttctataaacttagcttcctgactccgctaccagaccctcgcccaggactttgaacatagaactcctattctttccagcccatgatgatttctcagagaaaccatcaaatgcagaactgatctccttccaccaagtgtcctccccatctgcatgccaggtcttaggcctgaccttgtcagccatgaactagttttgcccaagcctagcacagcagcattgaccaaagagtcctttgtgttccagagcttacaagtctattaccaaccaaatatagatgtttcctgtgtcctccagggaaaagttctccaagtattgcttttacactagggtatatctggaagagcaaacatgcaagaacaaaacattcaggaatattctgaaaaaagggtaatggaaaggacttgccctactagcaattacaatttattagaaagcaaactcatataaaaatatgggtattgtggtaataaacaggccaatggaatagagcttcagaatgggaattagaaccaggagggaaagatatcttctttaatacatggcatcaatggacagttaactagctatttggagaaaaaatttcagcgggctccaacatgggagggtgatatgcttgatgtaaagatgccaacaaatgtagccaaggatataaagtttctttaatggcaggggatactgaaaagtgtctgaaaatcatgcccacacaaagtggattgagggcgcccaggtggaggctcccaggcccctgcacgtcccatgagaacacaggtgcctggaataccaatctcctagtaagagaagcgtgcacccgcctgttcttgggggactttgtgccctacctggactctcctacctgttctggagaccctggctatgtgcctagtattcatcaggtctaagcaacttgttcaaaacagctccaggactttcttaaatgtttgctgcaaggcaaggtaaattgaagctcaacttctcaggatgtgactgtcttctggcaggaccaggcctcaggcctgctggagagtgcttcctctattctcctatctcaccccttatatcagaatatcttccagccagaccaaagatttatatatatataatgaatattggcaataatagtactaatgtagagaaagctctgagaaaagcatgagtaacacttctgaaaaatgggcaaaggatatgaaaaattcaaagagggcaaaatacaagtgcgagtacatgcatgaagagatactgtcattctcaaatgattatgtaaatgcatttctaaacagtgactcagcatgtttcaatgattagattggcaaagattaaaaacattgagaatctacaatgttagtgagagtgtggtatgtagaaattcttatttacttttggagaatgttagtaaagttatcttgaagaggaatttggttgaaactatcagaagtttcagggtacattgctggtaggaattaaaaaatggtacaaccattttgggaactagatactttcttataaagttaaatatacacctactgtatgaaccaaccagtcattacacttataggtgctcaaggtccatggaaacaaatatccacacaataccatgtacaaagatatttgtagcagctttattcactgtagcttaaaactgaaaacaacccagaaatctgtccaccaaaaaatgcataaacaaattgtggcctacctatactgtccattccatccaccggatactactcatcagtgaaaatgaaggaagtactaatatgtacaacaacacatgaatctcaagggaagccagaagccagagcccatgctgggtgtagaactcttctttatagaagatctagaaaatgggccaggcacactggctcatacctgtaatcccagtgctttaggagaccagcctgggcaacatagcaagacctcatctccactataaacttaaaaaatttagccaggtgatttggcatgcacctgtagtcccagctacttgggagactgaggcgggaggatggcttgagcccaggaagttaaggctacagtgagccgtaattgcaccactgcactccagcttgggcaacagagcaagaccctgcctcataaaaataaaaataaaaatctagaaaatgtaggccaatgtatagtggcagaaagcagatcagtgtttgcctggagcaggatataaatggggggatagactacgaatggaaaagaagaatggaaatattctgtatgttgataatgctagtggccttacaggtgtatatattaatatatattcacaaatgtgtatacataaacacaggtattatatatatgttaagactcattaaattgtacattttatataggcccatttctgtaaattatatctcaacaaaattgattttataattacatcaaaaagatacctgtattgctatgtttattgcagcactgttcacaatagcaaagagatggaatcaacctaagtgtcgatcaatggatgattggataaagaaaatatggtgcatatacaccctggaatactactcagccataaaaaagaatgaaatcatgtattttacagcaacatgtgtggaactgaaggccattatcttacatgaaatatctcagaaatggaaagtcaaataccacatgttctcacatataagtgggagctaaataatgtgtatatatggacacagagtttggaataatagacattggagacttgaaagggtgggagggtgggagggggtgagggatgagaaattacataatgaatacaatgtaaatacactattcaggtgatggttacactagaagcccagattttaccactatgcaatatatccaggtaacaaaattgcacttgtacccctcaatctatacaaaatttttaaaaatggaaaaaaatgatttaaaaagttaaagaatgcattctctttgatccagcgattccacttccaggaatttaccgtacatagatattcacacaactgtgcaaatatgcaggcataagggtgtgcattgcatgatagtttgtagttgtgcaaccattgaaaatggccaaactatccaccaagagggcagtagataaacaaccaaaggtgaaagagctgctatagcctgtcctgtaaactccaagagggctgtgtctccagacctcacacagtgctgggcatactttatgcagggatgtggaaagggagtcaaggtatattaggtaaaaaaaaaaaatcaacttttaacttttaggaatagatgaacccactagaatggaactatttatgttagagccagaattaatttggtgtctttaggattatgtgagaagactgagggtcttgtaggaagactttgttcttgggtgaggctgagacatccctgggagagttgaaacaggatgagctgctgtttgctgcagggagatcaaaggaagagttcagatgcagacaagtgagggctaagtgtcccgccatagaggggtttagtccactgcagtgccctgtgacaggggcctcagagaaccacagcaacacagggctgtcagaaagggaaaagggtccatgccctactcactgggacctgggacctgtgcaggtggagccaaacaaggttggttcaggtgaaggcaatgagcaccaggggtttggcctgcttggttcctatccaggttgtcatcggctccagcaggtctcatccaaggggcagacctccaagacctcagcatttcagcagcagtcggagaggtgggaaagagcaaaggaagcaaaagcagaactaacatgctggatgaaggaatccatttcccaagtccccagggtcagaatgtcttcatctcttgagggatagattccctgcaacagaaacaggactggggccagactcatctcccctctctccatctcccctctctccatctcccctctcttccccatctcctcttgatgggaaaggcccaggctgagtgcagagcaagcaacgaatcattgcatgatgaggaaggatggtgcagtctcttccaggcctcgtgctctgggcttccaggcctggtcctatagtcatgaggctctggaaccggggaggggaggaagtctgtatttcaaagtcctctgtgcccttcctttgcatggaaggtgacggtttgtgttgttgggatcaagttgacatcactaggaaggtgtccttagtcataagggtcatggagaagcagtaacacgtgccactggattaatggtcttggtgctggaagacagtccagaaattttttggaaggaaaagtagaaaagtgatatcaagccaatgcttatccttggtctgtgactttcagagatttccaggagctgctgtttcttgatttgagttctagaggctgctctggcctgtaggtaggacagacactgtaatttgaccccagagaccatgggatgttcctaaaagtagttatccttggctggagcactaactggtgtcaggagagctggcaaacttcttggatggtgtactacgttgaatagtgactccctcaaaattcacgttcatctagaacctcagaatgtgactttatttggaaacatctttgcagatgtggtcaagttaaggtaacatcatattggattagtgtgggccctaaagccaaggtctggtgtccttatgaggaaagagagatttggagacacaaacacagagacacacagagaaggcaacgggacaacagaggcagagattggagtgatgtgtctgcaagacaaggaagtccatggatggttcgttccagcagacattgaaaggggcaaggaaggatccattccaagtgtcttaagagagtgcctggactggttggccccttgagttcagatttctagccttcagaacagtgaggaaatatggctgggtgtggtggctcactcttgcaatcccagcactttgggaggctgaggtgggtgtatcacttcaggccaggagtacaagaccagcctggccaacatggtgaaactctgtctctactaaaaatacaaaaattagccgggcatggtggtgcacacctgtaatcccagctactcaggaggctgaggcacaagaatcacttgaatccgggagacagagactgcagttaagcgccactgcactccagcctgggtgacagagcaagactctgtctcaaaaaaaaaaaaaaaaagaaaagaaagaaaagaaaaaggaaaataaactaaactgctgttattttaagccacccaccttcttgtgccacttaatggcaaaccaaggaaacgaatatataatacataatactactaatatataattctgatactactaattctaatatataatgataaccttagttcttgtggaaggaggtatgaaggagtacatcacattattttcaagggcaaacagtggtggaaaaaaagctgaattttaagttactaaatttagagaattagtaggaatttgcatcacacgagggtgtcttttactgtcagatcagcaattagagcagaggcttggatctggtagacttggggtcaggtgccagctccctcacttaccgtctgtgtgaccttggggacactgcttctctgggggtcagttttctcatctttaaacctagaacaataatagtttcatctcaaagtgttgctgcgagaattatataaaaccaaggtgtggcgcatcatggaggggtctggcccctcaaaaatgcttacacgtagcgttgctattattgtttttaagttacagacacaatgattttttttttcaataaacttgattcagttggcacacatgcacacaaaatacatagatcttgaccaggccagcatgtggacacagtctttccagagctcgtgagatgacaaatctctttattggggtattaatgtcaggtccaggagattcaatattcaatccactcatcaaggtcgtctgtgtagacagccattcactacctatagacgctcctcaagaaacagatgctttctggttttctgccaagaatgtcaacatcagattactcctaagtatcactcatttccacgtgaattagacagaacagtgttaagtggtttggagccacagctggctctcaatactgcttcaactcacactctgagaagaacgacagttgactgagccagcttccacacctctcaagagagtttgctgttttattccaaggggcagtaacaggaacatttctgcttgctgcggcccctaaatgtgcagcattctttagaccattatatggtgctttccccttctcagcgttcagaaacgttgagaaggaaagagcctcatcctattttttagcttcttggaggttgcagttgcttatcttttttctccactgggatatatttttctcttgcccattttttatgctgaattttctaaactcctttataatgcttttgctggtgagttacctttggaatgaatcaagtactttcactttctctatccagaagggtggttcacatttgctaccagtctattgggaagatctgggctcaggacaccccccacagattactgcaatactttccaaacatgtgcatttatcctgtaaccaccgattactgtaacactttctaaagatttgcatttatcctgtacctatatataacttaaggtctgcttacactctgaagactataaatagattcccacctgttgggctggtttccaggaaagatgcagggcccaggcacctagttctctcattggttaaaatgtaagtattagtaccttctttcttcttcttttttttttttttttttgagaagaggtctcgccttgtcacccaggctggagtgcatggtgtgatcatagctcactgcagcattggactcctgggctcaagcgatcctcctacgtcagtctcctaagtagctggaactataggcacctgccaccacgcccatctaattgttttatgtttttgtttgtttgttttttgtttttgtagtgatggggtcttgctatattgcctaggctggtcttgaactcctgggctcaagtgatctcacctcggcctcccaaagtgctgagattatagttgtgagtcaccatgtccagtccccttctccctctttcttttcttcttaattaaaagtaatttacatgacagcaattcttgtacacactacccagatttaatgtgttaacacttcaccttattgcttcaaacattgtagatacaacttaagaacccctgccctcctctttcttgtaccctcagaggtaattatcatcatttatattttcccagaaatgtttttgtatttttgctccacttaatggctgaggggctggggaaatggtattatattcattgccatttccttctttccatttcttttggggactctgtgctttttgaatgaaaggaaatacaaagggacttcacaaagttcatggaaaaatggaattaaaagctaaaagtaaaaaaatatataaactttatttctcaacatttgctccatcaagttgaagacacttgtaagcgatgatactaaccatttagttcgtccctaaaaaactgagggtcagtgccaggcatggtgggtcctgcctgtaattccagtactttggaaggctgaggcaatattgcttgaagccaggacttcaagaccaacctgaactacatagcaagacccccatctctaaaaacaataaaataaatagccagatgagttggtgcgtacctatagtcccagctacttgggaagctaagacaggaagatcacttgagcctaggagtttgagggtgcagtgagctatgatcatgtcactgctctccagcctgggtgatagagtgagacttcatctcaaaaaaaaaaaaaaaaaaaaaaaaaactgagggaatttaagcatgtcagtatagtcttttttacattagtaattgaagaaaaatggttgtcttttaacaaaaaaggcagaagaagccaaatcaggacagtaaggtggatgcctaatggtttcccaccaaaactctcacaaaattatctttgtttgatgagaggaatgaacaggagcactgtcatgatggggaagggctctctggtgaagctctcccaggtgtttttctgctaaagctttggctaaccttctcaaaacatctcctaacaagcagatgtcatcattctttggccctccagaaagtcaacaggagaaatggcttgagcattccaagaaactcttgctgtgacatttgcttttgatggatccattttggctttgactgggccacttccacctcttggtagccattggtttgactgtgctttatcttcaggattgtactgacaaagccatgtttcatctcttgctacaattcttcaaataaatgcttcaggatctggatctcactcatttcatatgtccattgagagctctgcccttgtctgcggctgatctgggcacaatggtttttggcacttatggaatagaaagttagctcaactttaacttttcagtcataattgtgtaagctgaaccagtccagatatctgtggtgttggctattgtttgtactcttaatcatcaatcctcttcaattagggcatgaacaagatgaattttttccttgcaaattgatgtggatggcctgccactatggacttcatcttcaatattgtctcatcccttcctaaagtgagttatccatttgtaaactgctgatttcttcaggacgctgtccccatacacttctcataaagcatcagtgatttcaccattcttccacccaagctccaccataaactcaatgtttattcttgcttcaattatagcaggattcatgttgctgtgataggaactcttttcaaactgatgcgcctcaaaccagatcctgtccagccatgttacaacaagttagtgtgtgtttattttggtgcaaaaaaaaaattgaaatccatgcattgctttttcagaatacacattttctatgaacttcttaaagaccccctatggaccctgagagtcagttattcaagatgtggcttattagggtctctgatcaagttgcaaatagtctaaatttaatttaaaaagaaacaacaacttgggttatagttgaagggtccttttgacgggtccgtcgagcccccaagtattgcccattttgcttaaggtcaaagactgaatttataaccctaaattagcctctgaaaggagagtgaagtcaatttaagcccacaagatttttccagtgtgaattgtttgctcaatgctggttcaagtgcctaggggggatacaagaaaatggcaaagtgccacgtaaaaattttttttttttttttgagacagagtctcgctctgtgcccaagctagagtgcagtggcgagatctcggctcactgcaagctccacctcccgggttcacacgattctcctgcctcagcctcccgagtagctgggactgcaggcgcccgccaccacacctggctaattttttttttttttgtatttttagtagagatggggtttcaccgtgttagccaggatggtctcgatctcttgacctcatgacccacccgccttggcctcccaaagtgctgggattacaagcgtaagccaccgcgcccagcctaaaaaaaatttttttttattactttattttacattccagggtacatgtgcaggatgggcaggtttgttacataggtaaatgtgtgtggcatggtggtgtgctgcacctatcgacccatcacctaagtattaagcccagcatgcattagctattttcctgatgctcttcctccccttaacccctcccagtccccagagtgtgctgttcccctccctgtgtccatgtattctcattgttcagctcccacttgcaagtgagaacatgtgatgtttggttttctgttcctgcattagtttactgaggataatggcttccagctccatccatgtccctgcaaaggacataatctcattcctttttatggctgtatagtattccatggtgaatatttaccacattttctttatccagtctatcattaaatgggcatttgggtatttgctcttgtgaatagtgctgcagtgaacatgcatgtatctttataatagaattattcatattcctttgggtatatacccagtaatgggattgctgggtcaaacgttattatttctggttctaggtctttaaggaattgccacactctcttccacaatggttgaactaatttacattaccaccaacagtgtaaaagtgctcctatttctctgcagcctcaccagcatctgttgtttcttgactttttaaaaattgccattctgactggcatgagatggtatctcattgtggttttgatttgcatttctctaatgatcagtgatgttgagctttttttcatgtttcttgggcgcatgaatgtcttctttcgagaagtgtctgttcatatcctttgcccgctttttaatgggttgggttttttttcttaaaaatttgtttaagctccttgtagactctacatattagacctttgtcacatggatagtttgcaaaaattttctcccattctgtaggttgtctgttcactctgatgatactttattttgctgaaagcaccagttttcggaggattgacatatcaattaaaatgaaaatatttttaaaagagaataataagagatagaccataatcaaacttgaaattgcatgggggaatatctgagagccaaaggaagtaagaaaagagtgaattggggtgacatcaggatacgagagaataacggcagagcagaaatgcggcaaagtgagaggaagacagtaaagaatgatgaaagtcatcctctaggctgggtttcacttttctaaaaactttcctttgaataattcacacagcactcgacagagtgtcattttcgtttttagaccacttaataaatatcgattgtaatggcagaaaatgtaattaaaaattaaaatgctattattcttgagatactgagcctggcttccaaatattatttggtaaaatgttctcacagtcttggacacaacttcagcatgacagagtgaagccttcaatatcacttgaataaatgctgaacagaattgtaaagtagagtcactaaaagaacaaatttctctccatagtgcatttgcttcttttacatgtatactttcaagtaggtatcagaagccatcttttatattttaaaaggctctcctaggaaattttcagaagaatccaaatatcaacatatcctctaattttaattcttccccattagcagcttcttttgctgtgatggaagcaaagttttatgtatagctattttttgtttatgttctcaatttgactgtaaagtaaatttcagtaaattcgatattttttattacttctcttgatgaaattggaggagcatttatttgggaaaatgctatcaatatatagatttgcaaactttatgtgtagcatgacaagctaaggagctacaggctgttgcaagccaatgtcttttaaattagcattttatttatttatttatttatttatttgagacaaggtcgcactctgtcacccaggctggcatgcagtggcgccatcttggctcactgtaaccttgacattctgggctcaaacgatcctcacacctcagcctcccagctggctgggactacaggcatgcaccatcatgcctgactaattttttaaattttttgtagagatgggatttcgccatgttgcctaggttggtctcaaactcctgggctcaagtgacccgcccaccccagcctcccaaagtgctgggattacagatgtgagccaccaaatttttttttgtattaaaaatgatacatggtgattctagaaaaattgacaatgtggaagttttttaaaaagaaaacagaaatcacccacaatgaatatggataaccactggtagcattttagtttatttccttttagttcttcctattatatatgtaaatttttaataaaattgggatcctattgcaggtgcagctttgtttcctgctttttccactttttattatgtcctaatcattacctatattattaaatattatttagaagtgtgatttttcagtgtctgtataatattttctagtatggacttataattaatttaaatataactgtattattggatatttaggttgttcctaactatttactaaacagataaggcgtttcctttacataaatatctttgcagcacctctgaatatttctataacatacatgtctagaagtgggattatagaggcagacactgtggacattttaaagacttgttaaaccaaatttagcctaatgctgcttccttatatgttttaagttccacctaaaggttcttctgtacctcgtgaactataacctaagtggagttataaacaaactgtagcctactcttgtgtcaatcactgagttttggctaatgaaatgtggccaactgttcaaaacgtgttcaaatacagcaaatgccaatctgtaactaatctggctgtttctgtacctcacttctgccttctgaacatcattttcttttttctgttcataaatcttcttccaccacgtggctgtgcaggggtctctgagcctcctctagctcgggagactgcctgattcatgaattgttctttgctcaattaaactgttttacatttaattcagctaaagcttttcttttaacatactcttaacagttatggccaaattgaattctatacaagatgtcctaattgactttcctaccagcagttgataaggtgtctattttactgcacccttgccatcaacacatatgatttttaaaatatttttcaagccagagcctcgagatggatccaagaatcagagcttcagagattcagtgcccatatcagtgggtccaaatgaggttgtgaagggcacctgagagagcaaaacaggctgcagacacagaaagatttgaaatcattcccacaggtactataatatcccgcatgtccactgagttgtttcatgggccagcaggctgatgtgtgcctaggtgtgctgggctagcctaaaggtgcagagcagaggtaggcgcctgtaggaaaacagcctgctgcatagcaagagtgacgccatcttgaagcgaaagcaccataatgacccatgtttgactccagcacaccaaggcgttcctgcggctaggtcaagaaacaatacctgtagcatagataactcctcacgaagatgcttatctcacttccccagtggtcttaattttcgcaggaggatctgagacatgaccagctgcatgctttgccctaaaaacttgccatggaaagaatacttcttggagggccagggcagggatccactctctcagggccaccagagacatggcttctaccataagtccctattaagtgtttctttcgaaaaaagtggatttatcggcctccttctttggcctccttcttcagcctcccagctccctcagccttttggagtaggtttgcacagacctgctccctgcagaacagcaccacaggcgtctttctgacagctctgcctgatttctctttcctcttccttttctataggtcctgttggcacaacctactgacaaccctacaacaaccaagggcctagtctcccttctgttttaagcccatcaagcaagaacaaaagggatataaacacttcctgttccattggaagtaagcctggaatgaagtcccaattccatgccgaggaaccagtgagccccaaaataaagcgatgtctccatatcacatcttgaatcacctccatttccaaccagattcagaatccaatgctcagggataagggagagcgtccagtagtttccactggcctcccttccgtttctcccttattgtctgtccctccaccaggggtatggcctataccagcttgtgaagagctggtggctaaacgttcaggaattttcagaggcgattgttaaatatagttattaaacaattaaatgatgtaacccttccactacataaactatattaaaacaaaggtaataaatacccaaaactcaccactttgtgatcttactgcactttactgtcattgacatctgtcaaatctgtacgggggaaatacgtaatgctgtgctactgttcaactccaagttcagtgatgtcagggtggtagcttgaaatcgatggaagtgaaagtatttacactgtagaaattggccaatgatataaaatgggccttgatttactgttttgttgattgtgtagacttaagaaaatgataaaatgtcaagaatgtggattaaaattaaaagtgtagcacaaatgcagctgttccattctgaatagcattaaaaatttgaggaaataatattccagtattgaaaactattatctaattcgggaaagcggttgctcctgtcatgatgaattagtgacattccaacattcatcttcattgtttcactttcatcttacatgttaaagtacatgaaaacatcaaccaacattcatatcttaaccacactcatccgtcaatgatatgagcaacttctttaccgaattggaaagttattaagcatttattcatagtctgattttatgacactgttgtcgatgacagaattattataactgatagtggattttgaggaagttgcaagtcagagtaatatagacgtataaattgaaaactaaggtaaatatgttagcttgaaaattttttctataattacataaagaaattaacaaaattttacattaatgctcactcagtcttgtgacttttactgatgtaacatacaattattttttagattcagatccctaaaatgccaaaatgatagagtgatcttgtggtaaagctgaaagagatttcagtttaatgaatataatgtatatgagagtgcgaaagtctaatggtagatcacatattcaatttaatgaaagcaatttattggggaaataggtatcagattgggatacaactccacttactcccttttcaaatgatcattgacacaaccataggttgactatggatataagaatttgacaaaaagagcaaaactttctgtgaggatcaaatggctatatggaatttataataaagagcattgtatatgttactattacttgtaaactgtctgatacacactcttttttaaaatttttttttatttttttgagacagagtctcactctgtcacccaggctggagtgcaatggcgtgatctcagctcattgcagcattctcctcctgggttcaagtggttctcatgcctcagcctcctgaatagctgggattacaggcatgagccaccaagctcggctaagtttttgtatttttagtaaagatggggttttgctatgttggccaggctggtctcgaactcctgtcctcaagtgatccacgtgcctcgacctcccaaagtgctgggattacaggcgtgagccactgcacctggcctacacatcctttatatcagaaaaatgtataacaaacacatatacttttttccagagagctggctgttaaacatttaccggcaccccacagctccccatccaccttcaccttacgttgactgccctatcagtttgaatttctgtctaggttccctctcctcagttctgatcacatttcatattccaggccattgcctttacagcaacacttcaatgtcaatgcgattgcacttggcaaaagatcatgtgcatgtcttggctctgcacagcatccttccccgggcttgactaggctgcagtgacccccaggtctctggctgagttcctatcactacagagagctcttccaagactcagccattgcttccaagtgttgggctctagaatttttgactaaattttaaaatagttgtacaaatgtcatatcatattttttccccagaaggagctgccaactgtatattctctagccttgggaaatcttacgtttgatgctttaaatttttgagaatgctgagttctgaacagtgcatgatgaatttgccttatatgagtgtttttgagattgagcagagtctgcttagcccacatatgcaaatacatgctggtgtgaagtggtaatttataagaccgtttttttgttccactgggccaatatggctttgtcaaattattccaactgtgaagtctcatgggtcatggtaagaaataatttctctactgaccacagttgagaaatcctaaagaaatgaggaagatgggcaggaataatcagagttatctcaatagcctcctcctctgcattaaatttagcaaagatcattgctttagacaacccaaccctctttatttgattctttttacacggattgatttccaagatcatacatcctcatgctcagccccagaaaactgattgcattggtgtttttagaattaatttatgggcctctaggggccttcaacactgtctcctttgctcaggtaacacaggaactggctgagattttgcagcagacagatgttgtctggaacgtaaaacaaaatgcctatgctaccaaacaaacgcaaggtttgaacaaacagaacatacattatttttaccatatgcatagcaagggggaacgaggtagcttcgtctagctttgggaccagaagcattttattttttatttttattttcatttttatttttttgagacagagtcttactctgtcgtctaggctggagtgcagtggtgcgatctcggctcactgcaacctcccctcctgggttcaagcaattctccctgcctcagcctcctgagtagctgggattataggcatgcgccaccatgcctggataatttttgtatttttagtagagacgggctttcgccatgttggccaggctgatctcgaactcctgaccttaggtgatccacctgcctcagcctcccaaagtgttgggataacagatgtgaaccactgtgcccagccagcattttatttttgtttgaaattactatattagctcagaatcatttactttttaagaatagtgtatatgaatcaccttagagatcaatttggagcataattgaacattttgaatacatttatgccccttagagatacttggtagatacaaatttaacttcctttttccctcaatctaaaacttcatagagaacctgaagaccagaaggagggtaaagtgttgctaatttttatcttgtcttagtaattgaattaagatgaacaaatctcaaaatgcaccacaagctgtaagataaatacctaggagaatagagtttcaaaaagagaattcttgcaacagcgtcgttaagaaaattagcctgattgtaaatattacctattgaatccgtccttatgtaactttgttaatcacacaaacagccacacatccatattcagaagctaaaaagagaaaacagcatatggctgacaaaaggcgtgtacccagtgcaagatttttcaaagagcacgttcccagcaaacacaatgtcctgctagcagttccaaaaggcttaaagtaaggcatcctggggtccagggccagggagctgcagggatgggccctccacctgccttggctgtccagggtgggaggccactggcctctttccaacttgccctgaattcttgcatcttccctggttgctcagctccactcagcgtagaggtggctaaccccaggacctgctgacacttgtcaaatacgtcactacctattattcattctcataagggagaaatttccagcacttattgcagggataggaagttaacaaactggcaggtgaatgaacctgctgattacgtgctaaaaatcagtattttttgttcctcttctcgcatttctcatcttatactgacatgatacaagggtatgtcagggaatgggttttccgccacttctctgccagttacaaactgtgattcagaacctgtcccctacacatatgagagcttagtttcctcttttgtgaaatgaagaggcaggattaaaggatccctggggaccatcacagctctaacaactcaggaactggggctgcacttcacaccttagaggagaattcctttagggggattaaaagcagcccagacatgtggtctctacagtaagaacaatgaaaatgcttatttcagaacccaaacccccctcctgatgaattgtcactctcctgtcaggccagcacacagcattttcatagggctccttcctccttagagcaccttcactccctcatccaattacctttgcttcatatctaagttcaattaaaataattaaagcagctagcagatagttgatggggaggaaagacatggacaatttcctggaagaattctttaaggggcaatataaaagaccaaggactgtgaaaagtagaatttttcttactggaattcccccgtctgggagcccatgcacttcccagatgtttcccatgatttttatgggtgccacaaggaaattaaccaagcaagaatgcccagttacttctctatgcaaacgaagagcagctcatgcaaaaatagccataccccactgttccagttatctatggctgcctagaaagctaacccaaaatatactggcttccaacagcaaccttttattttatttcccaattacgtgtatcaagaattcagtctgagtgtggctgggcgatttgtccattctacacgtcagccacagaggtcatttagtaactgctggatgaactggtctggagaccccaagatagctcatcctgtgtgtctgctgccttgccagggatggctgaaaggctgagctcacctggagcacccgggctctggtggcttaactctaatagtcaaatcctatttgaattttctctttgctacttaccccaacctctccctccttctcctcatttttctttttgtatttataatgaatattatgatgtctatcctagtctgcttgggctgtataacaaaagtagtataccatgggggatgtaagagcaaacatctatttctcacagtactggtggttgagaagtccaagatcaaggtgccagcagattcggtgtttaatttgagcttacctccagatttgcatcctcacatatttcagagaaaggtcatctctctagtctcttctttataagggcactaatgtcatcagaagactctgctcttatgcccaaaggccccagctcctaataccatcacactggggattaggctccaacatgtgaatgaggggcagatggtacaaacattcaggccacagcaggtgttctttttatcacaaagtactacatgcttactgtagagaattaaaaataaagaaaatacaaggaagaaaatgactcatactgccacaatctagaaataaccacaagtaacgtctttccattctttcttctgtgtcatgtacttagatttcaagtttagatgatatttagttcatgtcttgcttttaaaataaacaatcaatgactattttcttaagtgatcaaatatcccttgcaaacactgtcattactattattattattattttgagataggatcttgctgtgccacccaggctggagtgcagtggcaccagcatggctcaccacagccttgaactcctggactcaagtgttttctccacctcagcctcctgagtagctggaactttataggtgcatgtcaccatgcccaattagttatttaaatttttactagagacaaggtcttgctacattgctggtgctgaactcctggactggtgctgaactcctggactcaagcgatcctcctgcctcaacctcccaaaatgctgggattacaggcatgagccatcatgcccagctgcaaatgttattttttaatgctcacatactacttcattacatggaatgccataatttatttatcaatttcctaattgtagtacacttagattgttttcaagttctggcttgggtaagtaatactctgaacacttacacatcaacttttgttcgcattttaaattatttctttaagggagattctgacaagtagaattcctggatgaatcctctcaccttgaaagtcttccttcctttgacttgtgagtcacttttcctccaggatcccattatctcagataaatgcttcctaacataagccttcatgttttcttctgcatatggctggttgttaaagccatggaacctggtaagatgtgccaagagggtttaaaactctaaaaaaggcaagaaaaagatggttttcaaatggcaaaaatgtgtttataataaacccaaagaagtaaatacaaaagttagtaaagactaaaagttcaataaaatgtctggttatgagagctatctccaaatttcagttccataccaaaaaaaagaaaatataattaaaatatgatgatgtttttaaaagcaggcaaaaatataaaatgcttgggaactgacctaatgcaactggagcaaagtaccatgttccttaaaggagagagaaatacagtaaacatgataattctctccagttacatgtcagagttttaacactattccagttaaaattctaatcgcttactttatcgaacttaatataataaatctaaaattcattcagaaaaataaggagaatattgatgcaaagaacagtgagatacaactagctttacctgaaattgattttattataatactgaagttggcaaaatgatatgattggtgaacattttgtaagtaatggaagtacttgcaaagaaaagctctcgggggtcatttttaacaaactcagatctggagagagcctattctatttgtccctcttaaataagaaaacatgttatttcatgatctggaaagttctggatattgtcatacctctgggtcctggggaggcatagctactcactttcaggcaagtggggtatatacaaaatggataaaaaccttcctgtggaccttccctctggtggtgggaaatcctgtttaactcaggtagcagcatctaaagcagtgttggtgactagctcagtgttcgaggctttgagttccaagacaaagtggccgctatcccccaggaaaaggtggagattagcaaagaggttgtagaacatttcttaggagctcaggaaggtagaaaacagggatctgtctgtggataacaaggtgggcctcagaggaaagtcatgcaactggagttcaagtttacaatgtttctacattatgcctcttaagagatttcaggggtaaccatgaacctcaaggacagctctggtggtagagctatggctggaagaggagctggccatcactaaccaagaccgtcaaagaagccacaggcctaccggttgtcttcctggagaatttgagggcaggtgagtgccaggtttttgggaaccaggttggatcacacctaggttgatcccagcaataacctgtgcctaccagagggcagaacatcactctttacctattttctttactgtttcaaaagggagagaaaaggggagaaaacacactctatacccttccccatcacaacagacatctttaaaaaaggaacagcttcacctgtaagcatagcacatattttaggagacctacatttcttcacgtgtcagatgcattcttaacactgtgtgtgcaaacacatttttataagagggcattttcttttaaatacacacagaagagctgactatataagggaacgctatggtgaaaccatttgtaaagcaaataatcacttcctgaataaatctgtctctaagtctggattttcatattttatatcagatttgactaaaggaagtgctctctacaaatgtatcctctgtccaaattagaatttatctgtatccatgcaaccttcagaatataatttccataataagtcaccaaatgcacatgacagtccaactccatcaataactttacctcttttttgccttttattcatactttagaatatacaggtatctgtcttggttagtccaggctgctataacaaagtaccacagtctgggtggcttataaacaacagaaaattatttcttacagtgccagaggctaggaagtccaaaaccaggtgccagcatggttggtttcttgtgacagccacttttcaagttacagactgccaatttcttgttggatcctcacgtggcaagaaagagagttaacagagctctcgggggtcattttcataagggcactaatcccattcatgagggttttaccctcatgtcctaatcacctcccaaaggccccacctcctaataccatcaccttggcagtcaggacttcaacatatgagttataggaatgcaagcattcggtctatagtaatatcttattatacagagagttatgttttgcttctttgtaaaaccttaggacttcatccacaaaagaaggatgcaaatggccattaatatgtgaaaagaagctcagtctcactagtaatcagaaaatgcaaattagccaaaaccatgtacgagttttactcatcatactagcaagatattcataatatcaaatattgaacaagctatgcagaaaatgtataaattgtaacagacttttttgaaggacagtttgacagtattggtaaatgttttaaatacacataccttctgacccagcaatttcacttctatgaattttccctacaaacatgcttgtgcaggtgcacaaagatgcaagtataagcttgctcattctggcacagtttgcaaaaacaaaaaagctgggcaacaaatatgtctcatagtagaaaactggttaaggaaataatgtccaggctgggcacggtggctcatgcttgcaatcccagcactttggtaggccgaggtgggcgtatcacttgaggccagaagtttgagaccagcctgcccaacatgacaaaaccctatctctactaaaaacacaaaaattagctgggcatggtggcacatgcctgtagtcccagctacttgagaggctgaggcacaagaatcacttgaacccgggaggcagaggttgcagtgagccaagattatgccactgcactgcagcctgggtgacagagtgagcctctgtctcaaataataataataataaattatatccatgctacagaatactatccaaaagttataaagaacatgataaaggcaaatgtactgatatgccaagattttcaggacacagttttttttaaaaagcaggttgcaaagcaatgtttacagtctatctggtttatcaaaaaaaatgaaaaatcaaaacactaaaattatataagaaatacaggcggggcgcagtggctcacgcctgtaatcctagcactttgagaggctgaggccagtggatcacttgaagtcaggagttcgagaccagcctggccaacatggcaaaaccccatctctactaaaaatacaaaaattaaccaggtgtggtggcatgtgcctgtaatcccagcaactcaggaggctgaggcatgagaatcacttgaacctgggaggtgaaggttgcagtgagctgagatcatgccactgcattctaacctgggcaacagagtgagactccatctcaaaaaaaaaaaaattaaaaaaaaaaagaaatacaggtgatagacagatagatttagttaaatgtaaacacatattaagaggctgataggaatatgtcttaaaatgctaagtggttaatctttgaagactgagtggaatgaaagaagtagaactatactttttaattccatcttttatattgcttgatttctcataaagggcctatatttatgtcacagtatataattgcataaattttaatttatacaaaatttaggacatttgttatataatatgtaaaaggggaaaaatcactactaaaatacatgcttagtgatatacatactaggtggaaaatactagaaaccctctccttgcacctgattctttctcattattgtaggaaagctaatcttcagttctgggaaccttgcaggaattctgtgcactaaagttcccagggaaagagaatgctctttttcatctttactgttccactaccttaagaaaaatgagccccagaggattgtactcttgcatacctggggaggcttcctgccaactgagcagggtttccaggtaagaaagggcattggctggatgtaggagagggcagagagcttgtctctactagaaccctcaaatggtgttggggaaactgttcagtaggctggacatgggttaaagagagaatcattggcttttttacttcttcatccccctttccaatttccttcctactttgcagtccatcgatttccaacttctccctgttctttcccatgcccagttttctcacaaactcaaagtgaaagccttgcccagccaagccttgtgctcgaggacctaccttccccaccctcccctccatcatttttcttccctcatttactactagtgtaaagggatttcctataagggtgctctagctaatctaacaagccaattcatgcttagatgtactgatttgagcagagacagcctcccatacctccacctccatatttacttaagaatcacctttggctgcccatcaacggtagattgaataaagaaaatgtggtacatatacaacatggaatactatgcagccataaaaagaacaaaatcatgttctttgcagcaacatgaatacagctgaaggacattatcctaagagaattaatgtagaagaagaaaacctggctggacatggtggctcaagcctgtaatcccagcactgtgggaggccaaggcaggcagatcacttgaggtcaggagttcgagactagcctggccgacttggtgaaaccccttctctactaaaaatacaaaaattagccagttgtggtggcacacatctgtaatcccagctactagggaggctgaggaaggagaatcgcttgaacccgggaggtggaggttgcagtgagccaagattgcgcaactgcactccacttgggtgacagagtgaggctctatctcaaaaacaaacaaacaaaaaagaaacaggaaaccaaatattgcatgttctcacttataagtgggaggtaaacattgggtacacatgggcataaatatgggaacgatagaccctggggactaccagagggaggaaagaaaggcgggtgggggaaaaggttgaaaaactattagatactatgctccctacctgggcaatgggatcaaccgtaccctaaacttcagcatcatgcaatatacccatgtaacaaacctgcacatgcaccctcgaatctaaaataaattgaaattattaaaaaaaaaaaagacagccttggcattaaggtattagaaacatggagagtgagaatctaaagcaatagacctgccccacatgctggaattggggtgttctctgggatgacctggctatccctgagatcctatcagagaaggagagaatctgctccacctttcaagtcatgtgatagcagaaagaccactttccaaggaccaaactcacaaccaagttcctacatttcaaggtcaagtcttttttcttggggcatatcagtctcatcacttcttcaatgaagaggattaggccagataatcacttctagctctgatgtcccatcattttattatttttttttaatctgttttcttcctgacagcataggaaggatcatttagccattagaccatttagcataggaaagaccatttgctgtgggagggagtatagtgtaatggttaactacctaggttcaaatcccatgccttcccttactagctatgtgtcttgggcaggttctttgacctctctgaatttcagctgccccatctatataatgcagctgagaaagtcatccacttcctgaaactgtggagagctgaaagacagaaggaacgtatcgcagcatctagaaccaaagaaaatctctgtgctcttggatacagcagtaaggatacacatctcagggttgaatcactttaaatagttatacttagataatatttcaccacttataaaagtaggcacacaagcccaagttcattagattccttaaataacactttgaggatgtgggcaggcatgagcatctccatgacatgagtaagataaccaaagcctagggtgttagctagggtcaaatactgggaggttgtgaagccagaacacagaaatgtcattcattgttcatttattcaaaacatgtgagggcccgctttctgttggacactgtgctacgtataggagtagaaagatgagtaaggccaggttagaggaggaggtaacagtttcccatggcagagctacaagggtaagcctgttacagtgcaagagctagactttggagtcacctgtcccctacctgaatcctggatccagcacttagtagggtattactggggcaagttactaacagctcactgcctcagtttccccatctttaaggtgcagacatgatgtttacttgaggctcagcaatgcaggagtgttgtgagacaatttttcttgctgacatgcaaaagtacttcccaacaatatcatcgtgatgaattcaccatcgtccaggttagagtcttcagcatggaaatcttcaatccctggttttctcggtagcgtgaggtccagttcttaggggagtccttataattagccaatcctatggagactgatggtgaacttccttggtaactcataattcatgatgacaaataaaatgacttatgtctaaaaatactcaagtcatgatgaagagtgcatggtccgtgacaggcaaaccaaaactaaaaacaaatgagctacgggaactgagtgcttaatggcatcagatctttttactaaatatgtttatttccacaacagagaagttgcttcccagtggcacacccagatgcttcatggaagggcacacctctggggtggtgctgggttcagactggcatggtatccacacttctcctgatgctagctttctctaggccctctgttagctcgtcccgcttctgatggacacatttttttttccctttgctatgtcaacaccatcactatgatctcatccatcaggtatattactaagcaagaaaagaggctctgtcttctaaacaattcaaataagacctggtacctcttccacacaacagttccttaggtgtttctgcaaactctaagagtgccttcagatgacaccctttccccatcacccccctaggaggcagaaacaccaaacagaagctaccaaagtggccagacatggtccaaagctttcacagctgggagttctgagagttggagcagagactttgcagccaggggagatgatatattaacatatatctgagtattgatatatttgaatttttcaaatcccagaacgtaaagggtccactatgaatttgcgttccctcttccatgtataaaaccagatctgcccaagataatatttattttcacacatcatttggaagtatctgtttcatttcattatctatgttgaatgaaaaggttatgtcatttggacttgagcctgagcagagagtgccctgtcattataaggctgtaaaaacaacctcctcttcctcctctccacgctgtgttccctggacatctacctgttccaggtttaagttctgggctaggtcagtgacgtctgagaagagagacttcagggtgcctcttgccctcttgttaagcagagcatggtataaatacctcagcagcattctggactaaagctctgtcaaaacaactgctactgagtcgtttaatttgtggaaaggaaatcttatttggaaaaataaagttcttagttccttgcaacattcttacactgcggtagggctcagaatgctggagaaagcacttcgagacctgaaacccagccctgttattagtaattcatttgctttaggacatgtgggagaaaatgcattccttggcttttgggtccaggtaggcagctctgccagcaacaacttggaaacactttggagctgagtgctttgtgggctgcggcagcgtggtaaggaggctgccctcctgccgaagctgcgagggcagttggaaaggcgcttattttgtctggtaaaagcaaatttccaggcttagctaagcatgttgtgcaacctagccccactgaatgcctatgggaatgctctaagatgcccagtgagcatttctttatgcaacagtgcattttcattttcaacgtaagactcttttgagcccagttcttgtatctaaaggtcttatggtgtcagggccacgagattgtgtggggcctatgggtcacaggttaaaatctagagtgggttcctgtgcattctcagtatattctatgccagactatggaaatgaaccctctacaacaggagacaccattactcagtaaatgcacatgtaaaataatcagataatccgtgagtcatcaatatttattcaattgttagtggtaatagagaagaacaataccataactcacctattttggacacttaggtatccaacaaacacttttcattagtcgattattatacaaatcagtggctgataatagaaattcactcatcatttatctttaggctaggattgcatgatgtgatagcctcccacagttcacgtgccttcttttttttgagacaaagtttcactctgttgcccaggctggagtgcaatggcacaatcttggctcactgcaacctctgcctcctgggttctcctgcctcagcctcccgagtagctgggattacaggcaagtgccaccatgcctggctaattttttgtatttttagtgcagatgggatttcaccatgttggccaggctggtctcaaactcctgacctcaagtgatccacctgcttcagcctcccaaaatgttgggattacaggcatgagccaccgtgccctgctggtatgctcttttaaaaaaaaaatttttatttttaatttttgcaggtacatggtaggtgtatatatttatggggtgcatagatgttttgatacaggcatgcaatgcataataacctcatcatggaagatggggcatacatcccctcaagcatttatcctttgtgttgtccaggctggagtgcagtggcgtgatcttggctcactgcaacctccgcctcccaggttcaggcgattctcctgcctcagcctcctgagtagctgggattacaggcgtgtgccaccaggcctggctaactttttgtatttctagtagagacagggtttcaccgtgttagccaggatagtctctatctcctgacttcatgatctgcctgccttggcctcccgaagtgctgggattacaggcatgagccactgcacccggctggtgtgcccttttaaaaaatattttgctcaggctgttgctgaatgagcttgcatttctcaggatggtacacacaaattaatagcatagaaaagtggccaggaagtgtgctgcatctgaagaggaatcgagtttgagagtaacccttctacagcacgtgttgtacaaagtcctcatggctccacccgcgggatgctcagagagcccttctctgcacaacatttcttacactgccttcctgccaataccccagggcacaagcacctggttttttcacccattcagcttgcattattgtagcactttgattccaaaacacaaaaaaagtctttcatatatttctttttattgattcccccaacaagcaagtaaaagatgtgaagtcacatatcactttccatcaagagacagtggtcactgattagtggatcagtccaaggccagtgctgttcacgtgtctatccgtgctccccttgaagggcaggattgaaatcatgctcctctagtttttagacatctagccagaggagggaagagtgcccagaaccttaacattcaactcagaattcaccaggaccatgggaagcccaagcccttccaggaagattccctgagccctttgacctccctgatgtctccctttcgtggtctcctactgcacttagtgctctgcaccccttctcagatggtgacttcagtctcatcctgtcctgtaacgttttcatgagtgtttgtcttcattcagccatgggatacaatgttatattgggtggtcagccctttttgaagggttaacattggactgaaccttcagtgattaatatcaccaattgggatccttaggaaacagactctggaatgaagattagcacacaggaggttctcagggagtgcttgtgggatcagcgcccatggaatggagaggaaggaagtggcattgggcagagggagaagctgagctatgaaggcctcagccgaccccgcagggggctctggagctgagatagctttttagagttgccctgagttggggcaaggggacaggcacctgctcatgagataatcagtcattggatggtggctcctccaaaaaggaagcatgaccttgggaggggcatctctctttggcagaggcaatgccagaaggcggctcacagctgagggctatctgccggcaacactttgagcacctaggggaacaagttcttcatttctgcagaggaatctcagcactgtgatatagcaaccatagcaacgaaacacaaacatagaaaggaaaagtattccaggtagaggaaacagcaaatacaaaagccctatgttgggacaaaaggaactttctatccaccctctgaaggtttgctctctgaaatagacttgattttagacagacgaacaggagaaaaggcatacaaatttattaacatgcaagtgcacataagccacacaacgtgtgaaactcaaagaatggccagatggttgaagtttaaatatcttcttcataggggagagggaagggaggatataggcaattttagaggaagagcaaatgatttttaggggagatgaatgggcttgaataataggcaatagcgtgggctctggctatggagtctactctagtccttcttcctgcaaagatatccggttgatgagatatctggggaaggaattcccaataattggatatcttctggaggatctggcatttaggtagataggggaactttagggagaccctcctctccccaccatatttgctgcttcccagatgcactcaatttgaagtccaaagtggcatatttgacacattttggggtatctatttttttctttttttttttcatttaggaagagggtcttgctctgttgcccaggctggagtgcagtggccccataacaactcactgcagcttcaaattcccaggctcaagcaatcctcccatctcagcctcccaaagtgctgggattacaggcatgagccactgcacctggcctggggtatcattttctaaaccccaacagtacaacaagagttagcttggcatgtgcaagcaatgggaagaaaaaatacaaatccatcactaggaatgtcacaaaagacagggagcgaagagaaggcaggagctgattgtccatgagttcagtatttattctagtagcagtggggagttttttgagggttttaagcagaagagtaacaggatttatttatactttcaaagattgccctggctgctgtatgtgggccataggggtgagtgtacagcggggagacagcagggcacagttgtagcagtcagggtatgaggctacagtaacttggatgagggttatggcggtgaagctgatgaggagtggctgaattcaggatttatcttaggggatagagccaataggacttgctgataggtcgaatgtaggatatgagagggaaagagaactaaagatgactcctaggtttgtagcctgcccaactggggagctggctggagcattagctaagatggggaaaactgggaaagaaagagttagggtgtgggtatgtgtggaacggaaggaagatagaggggcaaagaagggctcaggattgttttgaatatggtaagtctgagattcctgtcttagtttttgttcccagagaaaaattctgagataagagtttgaatgcaagtttatttcgatagtttattgcatttattgttatgcaaacaatattgcaataaacttggatccttggaggcgagccaaggaaacacagattgggtgatgtggaagtaagacagggaagagagggcaggcaacaaggggtgagtttatttaaaaagacaccagtgtatataccagtggagcttaatactgctggagaactctgggaaacagtacagagcatgtgcctaacagtggttccctgggaaaggtaaggaggctggggtaattatcaaccactcccgtcagtgctctgggattaattgattccttggggtgattgattccttggcacttgtgccatgtaggctggagcacagcaggctctgacagccagaggacatcccaggcaaagaggcaggggctggcaactggaagccaggctggtgggcactgagatggcaagggctgaagggatactggtgggcaagaagagtttcatagtcaaggcctgattaggacaccagataacacaaggagaggggctggtattcggggaggtcaagtgcaagggccagtatcacagttcagtctggagtcacaaagagaagacaagcagtaggtgaggcagcagttagatcagaatgacgcccatggacagagcttatgggcactggcacatcttttgaagaccctgagtcaatattaagagtggacatctccagttctagaatctcagtggattgattgagattgggtgcatcatccaaggatgtcagagttgcttctgcggggaacttgcctaaagactgattaggtgacttttcaaggctgcctacaaacctgagcttctatgagttcctcttttacaaatgcagaaatcgtggtgcaagaaagataagaaaaacccttagactctaaaagtgtgctgatgcccctagctaaagaacactgcacacatgaaagctcatcgcagtgactttttccacaaaggaggtgtgaatattttatcaatattcatgaaaaataattttgtaaggtaagcatgtcaaaatatgtcaaacccgaaggtcacattttccagaattctttttgtcccatattatgtttcaatgcagcatcatctttctgtccagcataagtgccccaggcaatggtaatcatttcattacttaattgaagtcctaattatattaggatctattgtcaaatgtggtcctgtcttcattacaacacttcattacaacaaccataagtaaatggaagtgttggacttttcctgtaagaatagttgaatttaacttctcaatcttgctctctttctttctttctctctttctttcttttttttgagatacagtcttgctctgtcgcctaggctgggatgcagtggcgttatctcagctcactgcaacctctgcctcctggattaaagtgattctcctgcctcagccttctgagtagctgggactacaggcatgtgccaccacacctggctaatttttgtgtttttagtagagacggggcttttccatgttggccaggctgatcttgaactcctgaggtcaggcgatctgcccacattggcctcccaaagcgttgggattacaggtgtgagccaccgtgctcggccaaacttctcaatgtttcatttcccaccccagctcatcctacctttctgagctggtaaccaaattcaaggcatgaagtttttttaaccaaaaagagcaaaacctttgtaatttaaatataatcagcctcccatttgggagatactctgcaaacatcttcatgacactctgggacagctgctattgtcctcttggctgcaatccctacattaaaaattcatgtttgtgtcctttctcggttgtttggcttagctttactcttaaaaagtgtttatgggccaggcacggtggctcatgcctataatcccagcagcttgggaggccaaggcaggaggaccacttgagcccaggagtttgagaccagcctgggcaatatagtgagaccctatatctacaaaaaaaattaaaaataattagctaggcatggtggtgtatgcatgtaatctaactacttgggaggctgaggcaggagactcacttgagctcaggaggtgaggctacagtgaactatgatcatgccactgcactccagcctgggcaacagagaaagaccctgtctttgaaagaaaaaaaaaagtgtttatgatcctccccaaatagactccatccttttatttctcactgaactcccagacagaggttcttaacctgaagctcatgagtcctgtgaatttataaaacagctccaaagacgccacagatacctcgaaattatagaaaatttgatctagctttgcatttgagcctctccagggtaaaaatctttctacagcttctaaaaggaataggtaacctaaaaccaggcaaaacaaaacaaacaaacaaaaaacaccccaaaactttgctgttttaaaatccccattttaaaaaaagattatgtaaaaataatttttcttttttcattttgttttcatctttaaaccagctctccagagcctcagccaggctgcctcatcatcgaatcattctgaaatatcttccacaaaccttccccttgtattcataccaaatagctctcagctatactccaaacccatgcaatgaggtagaaaattacttccctccccctccgattcttaaagtggttaatttttttttcctggaatggacattattaatatttcaaatttgttctcattgctttataaactgtaaccatggatccagctctaataaagatgtcccagtgagttaatcatgctagggaacagaaaaactcagggacattcagaatcacagccagaagggggcaatccttctcacatcatacctaagactgcagctcctgtcaggctgcgtgttcatgtgtaaggcaccacaggccccgtggtgccagctcaccagctcatcttggtgccagctcaccaggtcacgtgctgactttaccagtacatgtatgctaattagttatcatccaattgtttgccttcctaaaggaatgagggcatcatctcctagaatttgtcttctaagctcttctcttgaccccggaaagaaatagtggacttcattgttttagggtgtttcatttttggaacacgaattgcagatgggttcgtggttggccgagaggagccaggccgagaagtttggctattttgtcaaaggcaatgagaagccactgaaggttttaagcagaaaagaattacagatttgcatttgagaagtatcagtttggagaataaattagggaggcgtaagatttggaggcacagaagccaggtggaaggctgtttttcaggctagaaaagtggtagtctgttgtaggttatatgcaatagatttggagagaatgggttagatgcagggatgtttatgaaatgggaattgactggcttactctggaggggatgggaagggaggcagaaaggagtcacagatgacatctttatttgtagattgggttggagtagatggtggtgtcaattaatgagataggaaacctagagaaggagtagtttatttatgggggaaaaaagatatgaggaattgaacttgggacatgctgatctggaggtgcctacaaaccattcaagaaaaagtgtcctacagacaattggagatgcaaagcttggagctaggggagaggtctgggctagaaacacaggcccattccctccatggagatggtaactgacaccatgagagtgaagattacccaggggtagggatgatgaagacagaacagggtccgggagggaacgctgaggaagaccaatatgaagacatggatgaacaaagaggggactagaaagaagtcagcagggggactggaaagaagtcagtagaaagatgtgttatcacacaggtgagccttgaggacattacactaagtgaaaagccagtcacaaaaggacaaatactgtataagtccactcataggagacatctagaatagtcaaactcacagaaagtagacaccagttgcggtggctcatgcctgtaatcccagcactttgggagatcaaggttgagaatcacttgaggccaagagttcaagaccagcctaggcaacatagtgagacccccatctctgccaaaaaaaaaaaactaaaaaccttagccaggtgtagtagtgcatgcctgtagtctcagctactcaggaagctgaggcagaaggattgcttgaggcaggaggattgttcgaggttgcagtgagctgtgatcacaccactgcacttcagcatgagcaacagagggagacccagtcttggaaaaaagaaacagaaagtagaatggtggctgccagaggcagggggcagcagggaatggggaattgtggtttaacaggtattgagtttcaattttgcaagataaaaagagttctggagacacatggtggtgatgggttatggccacacagcagtggggatgtacggaatgccactggtctgtgcacttaaagatggttatgataataagttttatgttttgtgtattttacaaccttttaaaaataaaaagtgtgtgctattgtgggagccaagataacagagcatttggggggatgcagtgtagtcaggaagcatgccaaaagccaagtatgattagaactaaaacatgtttatttattaatactttaccaacgtggtgaccactaatgttctttttaaaagtagttttctaggcatggggggcacagaagtcaggtttctatggattaaagactagagggtttccagtcaagttggccttggaagttcaggtcctcctctttgctgcaatataacaaaacataaaaacatataaaaacacatgaaaatataaaaacaaaacaaaaatataaaaataggccagtataaatagcacatacacacttgctgcaataaagccaagctacaaagggtttcctgactgctcttaaatattctcaacagcattatggggcagtatttccttgtcctcaatacaagacctgggcctgtggtgaagtcaactgtgaaaggggagtgaggggaaatgagagagggagagggagagggagagagagagagagagagagagagagagggagaaataagccaaaattctaaaacatacaaaaacaattaagaaaggcatccaacaaaatcaacagtcaaaagataaattcattctacatgattgcagtaataaaatattaaactatttaatatatatatatatttaagatctacagagtaataaatgaagaacttacatacctaatagaaattttatcaggcaataaagggaataatgaagagaattgtgaaaagaaataacaagaaatatttgaggagaagatggctgagaatgttccatcaccacaaatatgtccttagatcaaaagtattctccccatgccagaaggttaaataaaaataaaaccacacctagaaataacataatgaaacagctgaataaaaattccagagagaaaatcttagaagctaccagagagaaatagcagtcagattagctaaaagggaataggaattaaacagccccatatatttctcatcagcaataacagaagctagaagaccatgaggtggtatcttcacagtgttgagggtaatataaatgatttttcaagttattattcaagaaggaagacaaaactaagacagcaggaatgcaccagccaccaatattccctattaaaggagacacgtcagcagagaataatgtgaacccaaaacaacagtgtgggacacaacacacaattgtgtagacagacatcaataaaatagttcagaaaatcattgttttaaaaattatctttcaggttttaaaaaggtggaattaaaactctagaaacaattacaaatatgtatgagaaggttcacagcagttttattcatagtggctaaaacccagaaacaagacaggtgtaatattaataggtgaatggaaaaataacttgtgatatattcatacaataaaatattacttagcaaaaagtacacaaaaagactgataggtgaattaatatgaacaaattttgcagaaatgctgaatgaaaaagccagacccaaaagtgcacatcaatactccattatttcatttatacaaagttcaagaacagacaaaatgaattcatggtgtcaacacaggggttatacttagaagggaaatatttgttgggatggattacaggaagtctgtggagtaatgtaaatgttgtatatcctggattacaggaaatctgtggaataatgtaaatgttgtatatccttttatttttattttatttttttctttttgggagacagggtctcatttaggatggagagcagtggcacgatcacagcttactgcaacctcgatctcctgagttcaagcgactctctggcttcagcctcccaagtagttgggactacaggcatgcaccacatcatctggctaattattattatttttaaattttttgtagagacagggtcttgctatgttgcccaggctggcttcaaactcttggactcaagtgatcctcccactttggccttccaacttgctgggattacaggcgtgcccagcctataccttgatttttacaattcattgagctatatgctgaatatttatgcgctttattttatgtaaattgtagctgactttttaaaaaacctgccagcattataaaaattgtgggagaaataatgggtacagtcagtaaaagttgtacaattgatcattttaaactcatgatccctaataaccaaatagtgggaagtaattataatgaaagagatgatgtaaggagcagaagaaaatgcaaacaaacaaataaaacaaacctttcactttcattcatatcttcagaagataagaaaggatgttgtgtatatgaagcaaggtcagggacgctaaacataaggaacattttgaaaacaacaaaaaaagaattgttagaaattaaaaatataattttaaaaacttcaagcaaagtattggagaataaaataaaagtcatttcctggaaatcagaaaaaaaaggacaaagacaaaaatagggaaaaatgtaacaaaattagaggatccatttaagagatctaacatctgaattaggcattcttaacctggggtccccagactcctaaaaggtctgtggaatgagttcgttcataaacccatatggtaaaataatacatctttattttccctaacctctaacaaatatacaacatttcctcttttaaatgtccaggcagccatgtgtggcagctcatgcttataataccaacactttgggaggctgaggtggaaggatcccttgagcccaggagttcaagaccaccctgggcaacatagcaagacctcatctctacaaaacataaaaacattagtcaggcgtggtgctgtccttgtagtcccaggtacttgggagcctgaggcggaagggtcacttgagcccaggagttcaaggctgcagtgagctaaaatgccaccactgcacttcagcctgggagacagaacaagaccctgtctctaaacaataaataaaaataagtaagctgggcgcggtgggtcatgcgtgtaatcccagcacattgggaggccaaggtgtgtagatcacttgaggtcagaagtttgaaaccagcctggccaacgtggtgaaaccccatctctactaaaaataagccaggtttggtggcatatgccagtaatcccagctacttgggagactgaggcagaagaatcacttgaacccggggcaggggaggttgcagtgaaccgagatctcaccattgcactccagcctaggcgacagaatgagactccatcttaaaaaacaaaaacaaacaaacaaacaaaacagtaagtaaatatgtaagcaacaaagcacaactttactgcaactttgtcaccaatagaaatcataggtattttacaatcctattgcggttgttacagatatcttaaaattagtttgcattcaactttatttaaaaatggtagtttattaaatttgctattgtcttattatttaaaaacatatataactctataatgaatttatttcttttttatttttatttttaaaaatttatttcttaatgttgtgtcaactgtacctcaaaagaaagtgtttgtctttgtaatcctatgcattttattttgtgcatctaagaatattattgtgagaaggggctcatgatacaaaaacaagagtatttgatctgaaaaatataagttccagaaggaaagtaagctatcagagacaactaatttaaaaaatggaagaagaaaaatatttttagactgaagaatatgaatttccagattgaatggggctgccctgtgctcagcacaataaatgagaaagatccacttcaagagctagaatagtgaacttgcagtacctgtgtgatcaagtaaagaccccagaaatcttccaaagaggaaacaaagtgatatataaagcactgggaaacatgaggccatcagacttctcctcagcagtactggaagtcagaagacaatgaagcaaagcctctgaaattctaaaggaaatcattcccaattcagaattttatatgcagccaaattatctatcttaattgatagtgagtgttgttaacagaaaaacttcagcagaataaaatttaaaagagtttaattgagcaaagaacaattcgcaaattgggcagcctccggagccagggtgggctcagagactccagcacagccacgtagtggaagaggatttatagacagaaaaaaggaaagtgaattacagaaaacggaagtgaggtacagaaacagccaagctggttacagctctatgtttgtcttacttgaacacagtttgaatagttggccacagttgattggccaaaactcagtgattggcacaagagtagattacagtctgtttatacttacagttaggctatagatcaccacgtatggagaaacctttaggctgaatttaaaatacgtaagaaggcagttttagtctaaacttgatttaacactgtagaataaaaaaatttcagataatccaggagtcaggaaatatgtctcttgtgaaaacattgaagcttctgccccagcaaaatgaaagaagaaatcaccaaagtgcagacatgggattcagcaaatgggtaatccaacatggggaagaagagaaacaaattcccggggttatggtgaaggtttgtcccagatcaacatctctacagcagacctagagcgcaggcaagaggatggaggatgtgtacaaaacaaatgcaaatgatcatttatttgatgtgtttcaacatattgggagatttcatccctggcagaaatttgaggataaacagctacttttaaaataaaacaaggctgggtgtggtggctcatgcctgtaatcccagcactttgggaggccgaggcaggtggatcacaaggtcaggaggagttcaagaccagcctggccaagatggtgaaaccctgtctctactaaaaatactaaaattagctgggcttggtggcaggtgcctgtaatcccaggtactcaggaggctgaggcagagaattacttgaacccaggaggtggaggttgcagtgagccaagatcactccactgcactccagcctgagcgacagagtgagactccatctctaaataaataaataaatcaaacaaaccaaaaaaaaaaatgagaaaaaattgaaagttgtagttttaaaaataatttagaaatatggaggttaaatacccaaagaaaaagctagaagagtgattgattattacctttgggagaatggaatagaacaagatttctcaactttgctgctatcaatattttaaagtggataaatctttgtagtgggggggctgtcctatctttggcctctgtcaattatatggcagtatgtcccctactcccagtcgtgacaatcaaaaatgtctccagacattacaaatgtccgggcaggggattggggaaggcaaaatcacccctggttgagaactattagaaaaggagataaggaagaggagtgttttggttataagcctacttgattctttaagttatgttcatgtaccactgtgataaaactaaaaattaaatttaaagttaataggattcacagagattaatggtaattgattagaaaatataattttaagataatgctgttgacaatagcaacaaaactgtaaggtacctcggaataaatctcaaacaaaaatgaacaagaccataatgaaaagaattatgcccatcattaactgaaacaagaaagcctgaatcagtgaagatgtggtttgttcatgtatgagacaacagaacttcataaagaaggatactcttccaaactcaattgtatattaaattgagttctaataataatttccacaggatttttgctggatttgacaagccaaatttaaaaattcataagaaagagaaaagcgtcaggaatatagaactaatgaaagagaatagagagatgatttcactcatatggggaacttggtcagcagcagagatggaattacaaatccttagagaacggatggcctgttcaataaatggcctgggagaatcagctatccatatgaaaaagtaaagtggggtccctatcacatacagaaatcaattccagctatattaaaagcctaaatctgaaaagcaaactgtagataaagatacaggagaataccttaagagacaaaaacacccagcctggccaacatggtggaaccccatgtctactaaaaatacaaaaattagctgggcaaggtggcacatgcctgtagtcccagatactcaggaggctgaggcacgagaatcgcttgaacccaggaggctaaggttgtggtgagctgagatcgcaccaccgcactccagcctgggtgacagagtgagactcagtctcaaaaaaaaaaaaaaagaaaagaaaagaaaaaagaaacaaaaacacaaattttaatggaaaatatctataaatttgactactttgaaattaaaatttcttataaccaaggacaccaaacataacatagaaaagacaaggtgcagccaggagaggtggctcacgcctgtaattccagcactttgggaggctgaggcaggcggatcacctgaggtcaggagttcgagaccagtctggccaacatggtgaaaccttgtctctactaaaaaaaagaaaaacaaaatacaaaaattagctgggcatggtggcgggcgcctgtaatcccaactactccagaggctgaggcaggggaatcgcttgaacccaggaggcagaggttgcagtgagctgagactgagtcactacactcagtctgggcgacagagtgagactagtctgagaaaaaagaaaaagaaaagacaaggtgctctgaaagaagacacctgaatgcacagaagtgacacagggttagtattcagggtatttaagaacttttacccatcaataagataaggataaacttaattgaaaagaaggtaaaggagtaagcaagtaattctaaaaaggggaaatgtacgtagtcagtaagcataaggaatggtgcttattctcattggtcaacaggaaaaagcaaattaaaataccaataatctaccatttcatacttatcagagccttgattttgttctgatattaattatctcccctagtctcagataaatcatggttctgggaaagattttctcatgctaaaaaaaaaaaaagatatctaggctggggtttcatgctaaaaaaacatgaataaataaataaataagatatccaggccgggctcagtggctcatgcctattatcccagcactttggaaggctgaggcgggtggatcacctgaagtcaggagttcgagaccagcctggccaacatggtgaaaccctgtctctactaaaaatacaaaaattagccgggtgtcgtggtgggcacctgtaatcccagctactcgggaggctgaggtgggagaattgcttgagcctgggaggcggaggttgcagtgagccaagattgtgccactgtactccagcccaggcaacagagcaagactccctctaaaaaaaaacaacaaaacaaaacgcacagatatctagtgatatggtatggctctgtgttcctgcccaaatctcatgtcaaattgtgttccccagtgttggaggtggggcctggtgggaggtgactggatcatgggggcagatttcccccttgctgttctcgtgagagtgagtgagttctcacaagatctggttgtttaaaagtgtgtagcacctccttgctttctctttccctcctgctccagctgtgtaggatgtgccagcttcccctcaacttccggaatgattgtaagtttcctgaggcctccccagtcatgcttcctggtgggcctgtggaatcatgagccaattaaacctcttttctccaaaaattgtccagtctcaggtatttctgtatagcagtgcaagagcaaactaatacgtacagggatgtaacagttttatatatgttcaggtctcacagtgttgcctggaactatggcagccatcttatgagtgtgggtggagtgggtttgaagtgaagacactgacgatgagatagaagaactgtggaagaaacgtggtccttaatgacatcgttcagcttcggaattaaccagccctgggactgcccaacaagactgcatgtgttgcaggtgtgtgtatgtgtgtgtgagagagagagagagaaagagagaaacaagaaacaatttcctctttgttgaagacattttgagttgggttttctaataccacaaggcattatttaaagcaacatttctttttcttttttttttttttttttttttattttctgagacagagtctcgctctgtcgcccaggctggagtgcagtggcgcgatctccgctcactgcaagctccgcctcctgggttcgcgccattctcctgcctcagcctcccgagtagatgggactacaggcgcccgccgccacgcccggctaattttttgtatttttagtagagacggggtttcactgtgttagccaggatggtctcgatcttctgaacttgtgatccgcccacctcggcctcccaaagtgctgggattacaggcatgagccaccgcgcccagccccctaaatcaacatttctaataccacacgtcaacgtttaaatcatcctaagtgtccctgatgctacactgtgaactgctcaagataaggaaagtaccttgttcatcattattctctgcacttcacacggtgctcagcagatgctaaaaaattatttactgaataaaggagagaatgctcagactggctctagaaaatattgtaaagtaagtgaattttcttggtatttctttcttggtcccctcttctccttcatcactccacacccacatcctcccaccacaaccacaagggccccgcaaattcttctcatgcaaaatgacaagagaaaaaaatcttccttctttctctatgccccttattaaaaacacacctcttttattcccattcccttagccccattcattgcaaagttaatattgctaatttaattacaccaaaattaatttcttagattccctgtgagatcacatttccatttttacagctacctgcaaaacccctcaaccaaacaagaagcccatgatgggcagatggagctcaatggcaaagtgagtgggtgagatgttgaggggtttcagggtcttcttctagcacctcctagcatccaccatagaggcaatcttgcctctcactggccgccttcctatagaacccatcccagctgaagctcatgaaccagggagtgacacaggcatctccaccagatccaggtggaggagggagtaggcagcactcacactgcacccgggggtggaacagtagtgtgtgaagagaggaacatgaaattcattattcaccggaactgggccagcatttgaactgtggctagcctgttgcccaactccaggtggcgccactcacggggagttttatttccagaaaagcccttcccagaaaacagggcatgtacggtgccccctggagttgtgtgaggataccctactagtttggattcaacaaacaattgagatgagcatggtggcctagagacgatctctcttctgttggtgagtgggcgaactctccagaaccttccaatgcggcctcttgctcaacagtctttttgtggtgaggcagtagagaaatgaaagccatacaggtggagagcagagaccggaggcaggaaacatccctttaaggcggtgttctcagcctggctgcatactggaatcacctgggaagccttcaaaaatactggtgcctgcatgtgatgtaattggtctggggtggggttgggggcagcctggccagccaggatcttgacacactctcaggtgcaccagtgagcggctagcattacctccactgttccaagtctgctttagcaggcaccacaactcccacctaccccaaaccttgtcttgcaccagaagtgtttttactgtcacctgagtttatgctttttaatacttcatgctcattagtgaatctagtagctaatgagcactcctgtagcacaagttaatgctgtttgtccattttttgataggaagaaacccagcactgagaatgtaggtgtttatgtttgagatttacagcgtgcctttcttctttggtggttattttgattcttaaagtgaaaatgttctttctgcctattccctgaggacagagcaagaagataagaatttgagtactgtaaaatgatatggtaaacactgaaaaggactttgaaagttgaaattgttaaacattgaaatggattatcttaggaaagtgtggatcttattttgtagggacctttatttggtatagtttaagttgtgcatatttaaggcaagagaattaacaaaacaatcgcgtagatttttccaaatctgtgacttgaaggatgctacatacagcttccactgcccttcgcgtttctctccgaaacacatttagtaagcagaagtccgtatgcacgtgtgtgtgtattcatataggcctggatgtgcttttaatcccgcaagtatagccatctacagtgaattcagcatcttttcatcaggatgatgcctttacatcatgggtgtccaaccttttatatttcaaaacagattgacaaaatcctagcagggcacagtggttcatacctgtaatcccagcactttgggaggccgaggcaggcagctcacttgagctcaggagttcgagactagcctgggcaacatggcaaaacagtctctatcaaaaatacaaaaaattagctgggcatggtggcatgtgcctatggtcccagctactcgggaggctgaggtggaaggatcgcttgagcctgggaggtggaggttgcagtgagcagagatcgtgcaactgcacttcagcctgggtgacagagtgagaccccatctcaaggaaaaaaaaaaaaggaaaagaaaaacaaccaaaatcttgtacaaactgcacacaacagatacatttgagttaatttttatgtataataaaggcaaccagtaaatagattaaggctggtttgatgaacataaaacaccttagcttttgcttcgaaaatagtgacaaacttactaaaagttgcaaaaagtaaaatagcatagagaattctggtatatcctttactcagatttgcctattgtaaacattttactcacttgctttagcatttgtgtgcactgcgtgtgtgtgtctttctctatacacacaaacagtatttttcgaaggatttgtaactaggttacatatgtcatgactgtttacccctaaatacttcagtgtgtatttcctaaaggtacagatattttattatgtgactatagtacagtcactaacttgataaatttacattgatttaatagtctaccatccttgttccaattctgtcagttaacctaatatgtcctttatgacatttcccccctccactataggatccattctggagccagttatttcatttcatttttatgtctcttcagcctcctttagtctggagcatttccatagtttgtctgtctcttatgccattaacatctttaaagaatacggtcctccctctgcctctctctttctttttttttgttaaaaaaagaacattcaatttttattttattatttagttaatttatgtattattatttatttattttgagataggatattgctctctcccaggctggagcacagtggcatgaacatggcttactgtagccatgaccttcccggctcaagtgatcctcccacctcggcctcccaagtcactgggactgcaggcatgttccaccacacccagctactttttctgttttctgtagagatggggtctcagtatgttgcccaggctgatttcaaactcctgggctcaagtgatcctcttgcctcagtctcccaaagtgctgggattacaggtgcaagccaccaagcccggctgactttttttctgcaataggacagtcttcattgtgtgtttgtctgatgtttgcttcagtgtgaagagattaaggttctgcaccctcagccagaatgcacaggtgctgtggggtccttctcagagcatcacatctcgaggtacatctgatgccctcatcggatgcctgtctgccccttgttgggaatgttaattttgagcactcggtctaggtgttgcctaatttttccattatagaatgactgctttcttcctccccttgtaactaagatgctatctctggggagaaactttaagactgtacaaacactctgctcctcatcaaaatgtccacctagacttagcatccattcatgattctcgcctgttccaatttttacctaatgtttgcaaagtgaggatgttttagcttcagcaccctttccacacttatcagttcatctgtagccctggtaaacaagacagccctccctcatctcctctctgtctccctatctatctatctatctatctatctatctatctatctatctatctatctatctaaattcatgaattcctgtttttaaatcgtttgtacatggttttcatgctaaatcattttggtgctcagattgtaccagctttggctaggggagccccttcaaggtggctcacatgtccccctgctctgccccatccttgattggagcatttccttacattctggcctagaggactatcccaggccagtactgcccttaaacccaggcgagctcctggtccagcatctcaggacactgagtgctttaaaaccaccatcctcataattttcaaagtcctcctctggctcctggcactcaccagggccagcagtatcacctggctagggtgccctgtctcccctttggggtacttctccgacttcactctctcctctccttatttctttcatggggtcactcaagattgggctaccagaatgtgctgacacgcttatttggggtgattctcattcatttggacccatgattcattcagagctttgggctatctgctgtcttggctctcgcacttgagtccctgtgtgcctcgggatcaggacccaaccgtccgtgttctgctctacagcacgtgggcctcaccatttcagccaagggctggtgagacccttgctctgttctcagagttggccaaactgcaaggcctaggggaaaagtcttaaaaggctgccctcacttctgacactatttgcaagtttagggtgtcctaaaaccaccctcagttctaatgattcactaaaagggctcactgaacttattgaaagctgttatacttggtcgtggtttataaagaggaaaaggcacagattatcatcagccaaggggagcgacatgcaggcatcatctgggaggggtttgaatgcagagccctggctgtcctctccccatggagtcatggacagtgctgccttcccttggccacagtgtgtgccaatacagactgaggatttccagccatggaggctcgccctgagccttgggtgcccacagcttttactggggcttgtgcctgtaagactgacctttagtctccaacttttcccagaggtcaggctaatacgtttagtctacttttagtctctagtccctccagaggttaggactgatatggagaggcccaaagtctctctcataaattacatatttggactgtctggcagtcaaagcacccaggcaaacacaaatactcccttctggcaggacgtaccagggttatcctggatatcacttcccagtagctgacggcaaaggccagatctcaacttgggtaaggtaaattctccttccattctgtcctctcttgccctctggtaagtctgaagctatcatagaagagagatcagcatttcctgcctaagtgacactgcccttctcacaccacccatgagcctctcatgtttccttcgtgctgttggtggtctctgcaaggcaagggtgtagccaatactgaaagagtgcaaagtccaggaatgcagtgattcaggcctaaggaggtcaagaaaagacatggttggaagacacgccattctacttttaggctataaaattcagatggtaaatttaacatgtgcagaatgcaagtagtagtttacatttttctgcatcctttaggcatttgagaacatcatcaacaaagcacagaacaacatttgattgagtcaccagaagccagcattcacaggtggctcagtggatgatacaacatccaatgtgagtaaatggtaccagggaactgcagaggcaagagctctatcgtttcaatactaacaggatatgaagaaccatggcattatgagtagcaagagttgctcccttttctctgatacaaatttagccagggatggcacttttgacaataaagaacccgaagagacagtgcctggaccctaggaaggatcttcatgggtacagtttgaacaatgaacgtaggtaggaagctcttctctatcagtctaaagacattgctatcccttacctgatctcatgaattttgcaatacatttttaatcaaatattttatatggacagagagtttacagaaactatttgtctggtgtcccacacatgtgggggtagctgcattcttgacccatcttgtaccccagtcctgcaatcaggcttttctccatgaagcctggttcgtgctatcagagaccaagctctaggtattaggtgaacttggtgaacacaaaactttgaacttaggagtcataggtaatatgaccacatgatcattgtggtcttatatcattgtctgtaatgaataattgtcattttgggcagtctagcatgtgaccttctcttcctcctgctagtactccagctgctgtggggtatccctgttgtgtacagtcagagggaagtggtgactctatcactatgggaatgaacggggctacatgctccttctccttactctaacagactgtctaacagactctcctcactctaacagccacagccagttggaagctttcccctaggaatttcagtgttgagccagtatcacagaaatgtgggtaacaggaggtgaacccagtggcaatcgtgtgcagtagaattgttgcttgtgttcctactgcctcaccctctgagcccttttggtttctgaccatttcccaagattcttttcatctattacctgttgattttctaagcccccagtattaatgcaataaatgtccaaaatctttttgtgtaagacagtactggttttgttccttaaaacaatgaatcctatctgaatcagcatagtatttatttctgggttttggttttggttttagttttggttctgtctttgcttgtttggtatcaagaatatctctattcacttagttaaatgttcgcaagtggtaataatttaacagcttgtcttgcaatctcaggatgtacttcaagtcctcccgaagcttaagagtagagttacaggaaatttccatttcaaagtcaaagcatgtagagtatctaccaacagctcagaatccttaactggtgattgtttaattttgagggtgttaataaacagctttcccagccacttaaaattttttctgtttttagaaaatactttccaaatacatcttataacaatatgaaatgttcagtggcataaataaaaataagttcaaaaatctcattgctcatttctgacacatgtattcaaagtttcaaaacagccaagtttattttgctttgcaaaagaaactttaattaagttaatttaaagcaaaagaagttttaaacaaagtgaagggataaacttcatgtcattttcctcattggtgcattatctgcatttataagcatagtaataaagagactgaggtcagcaccaaacagattagccttttggcacaggtaacacattgcagtctccattattatgtacatttgtatgcgtcgcattgtcgtgtatataagtatgtgtttttacagttctaaaaaatagttattaaaaaaatggaaaaggccgggtgcggtggttcacacctgtaatcccagcactttgggagaccgaggcgggcagatcacctgaggtcaagagtttgagaccagcctggccaacttggtgaaaccctgtctctactaaaaatacaaaaattagccaggcatggttgtgggtgcctgtaatcccagctactcaggaggctgaggcaggagaatcacttgagcctgggaggcagaggttgcagtgagcagagattgcgccattgcactccagcctgggtgacaagagtgaaactccgtctcaaaaaaaaaaaaaaaaaaaaggcagaaaaccaaactaacaacaaccaaaaaaacaaataaaattaaattaaaattaaaataaattataaaatggaaaaaataatatttgaattattggcctctatgcagaatccttaaaaatctgctggaaaccacatccctgctggtaatgttctgcttctcctgtttaatttttaaaattgtgctattctaggcttggagaaagtcccacttccttgctgacatcttctctatgcccaggctagagggaaccttctctctttaataatctcttaaagtgattattttcctttcatggcagaaaaagaggcaagacatgcccttctttgactgttcatcattttgacttgtgatgtatttattttagtttattgtcaactatgtataagccttgttttcccaaattaaaatgcattttatgctcctcaaaggcgtgagccagaccctatacaaatatttgccacttgatcagtatcaaattctacttttgcccttcagacccatttttatctacttagtactgtgttttccaaacatgtcacctgctaccttttaccaattttgccttatcttcataccacgtgtgctatttttactagacacctttttattgcaaataaactcattttttaatctaaattaattcctttaaaaggaagctttcaataaatggaaaaccagtattgtttgccacaaatggaaagtaacataaaaataaatatattaaatacattaaaaaaataagcacaacaacactgttacttattggcctttataaagccagctactattgcctttgggttttgagcctaaggaaaaaagggagatcagagagtgttacagaaattcttccttagctaatcagagaggtttggaaagagcgttcgaaagggaatacctttctttctcagcatgggattcaatgttatctgcattatccatacctaactcagaccgccctggtattatgggtggcagatactcgatgaaaagcactcatagaatatgagctctcggagcctgagaaacatgtcctgtactcagcattcttgctctgtgcatctacacaactcattctccaagagcttccctgctctcccttgcatatctcttcatgatctgggccttatttttcttttcttttctttttttttttctcagctcactgcaacctccaactccctggttcaagccattctcctgcctcagcctcccgagtaggtgagactacacgtgcacaccaacatgcccggctaatttttgtatttttagtagaaatggggtttcaccatgtcggccaggatggtctccatctcctgaccttgtgatccacccacctcggcctcccaaagtgctaggattacaggcgtgggccactgtacccagtcacttctcttatctataaaataagagaattctactggatgccttttccagtggcttccagccctgaccttatcagggtctgtaatcacaagatcactggggttaagcattccagacccctgtttaccactaaccatccagcattagatcacttgccagtgttcaccacggaagctggattggtggctcattcttctaatcccagctactcaggaggctgaggcaggaggatcacttgatcctaggagtttgaagctgcagtgagctatgatcataaatgtcaccctccagcctgggtaacagaaacagtattcagcactggctcactcatcttcaccgtggaagatgacactaccctgtcccttcccaaaggaccaaagttaagcactggaaagatcctttttccttatgacaggcaaagtgctcagggaatatagtggggtttgagcttggttctacccccagaattgccactgttctcccaagtgccaatgacttctgatactctgcacatttaatttccataaagggaagggaatcacagacaagctaaatgtattttagcgtgtaatcccagtttaagttagttaaacggcaactgagctataaaatttgctgaaatcattttttatatatatatatatatatatatatatatatttttttttttttttagacagattctcactctgttgctcaggttggagtgcagtggcacgatcacagctcactgccacctccacctaccatgctcaagtgatcctcccacctcagcctcctgagtagctgggactacaggtgagtgccaccaattccagctagtttgtctttttctgtattttttgtagcaacagggtttcaccatgttgcccaggttgatcttgaactcctggaactcctgggctcaagagatttgtcggccttggcctgccaaagtgctagcattacaggtgagagccaccacacctgtccaccagaaataattttttaaaaacagaatgtcagggaccagtaggacgagtgggagtaagaataggcggattgtattgctgcgggtcctccccacttccggcaacatgaacttcttgaagtgccagcttccttatccttccttgagggatttgggctttgctagattttcattttctctcctagcaattaccttaaatatttacagaaactcttggatctgagaaaaaaacttaggaatcaaatttgtatttggtcttgaaaccactaagtaatacaaaatgcaaataggagttaagatttggaaactggcctttatagagcagttcaaaaaagtcttatgggatttacattttaaaaatgagaatttcttataaaatgagagaatagttgggcacagtggctcacacctatcatcccagcactttgggaagccaaaggggggaggatcacttgagcccaggtgttcaagaccagcctaagcaacatagaccctgtctctataatttaaaaaaaaaaaaaaaagaaaaatgagagaacatatacttcttcaacatgattcatattaatatataaagttatcattttaatgtaatgttatctccaaacaaatatctcatatttcattccaagcaatattaataagaatgtttgcctgcaaatatatattgaaaaaccattgactgacaaaatattgacaacacataatacttaattaagcctgtaagcttgtttgagaatgtgtcatatttcaaaactgaacagttaggccaagtcacctggtgagtcttttgtttctttaaaattcagccatgatacaagggttacctacagaatttagagacaaactccaaaactaacatgctcatcatcctaggaacattgtcatgtttcagcaagaagcaaacccctggaactcttacactaaacaagcttctggtgacaggtgaagctggggtttctctttagccactcctaccattatgggacctgcaagtccaggcttgtactggcgaatctcatgttacaatcactattcaagaaggtggttagaaaagagcagagggtatggttttatctaagtaaaatttattcctgcacaggaacaagctcaggtccacctaagaaatgaaacagccattttttttcaacagacttcttttttgtgtgaactcaaactaagacaatcctctgttctttcttgtagccatcaagccaattaattagagccaaaaaactgataagaactctgtgtactttctctccacttgaaggaaaccatacaaaaatatgtacaatctcgttcactcagaccagcgttgggtagaaatttctttgctctatctataccaacaaggtttgctaagcaaactaataaggtaaacagcacagaggaaggggagggggaagaaatattaactactaagagaagcaacttttaaccactttaaagcacgttcaaacaatctacttccttaagaaatcattagcacaccaatgtctttgttcattaaaggagatgaattatggaattattattctaattactaaagaactcttccctttaccaaaaatttatgcaaagttcctagagagacatgacatttgaatggaattcaagttatcaactttgagctacacacaatggatgatgaatctagtttagatactgagtgacaggctcatgcattttagatgagatggcaaattgccattcgggatattaaaaagcttctagaaatgatacaatgtctgggatttccttcaaagtaatctggtgggaaggagaggtggaaagaaggggatatttaaagataaataagattggccatgagttgatcaacactgaagctgatgatgaatacttgagggctcattatactatactctatatttctaaaaattgtccacaagaaaacatttagaaatttagaaatgaaagaatgaaagaaagaaagaaagaaaaagaaaagaaggaaggaagaaagcaaaagaaagaaagaaagaaaaagaaagaaagaaagaaagagaaagaaagaaagaaaaagaaagaaagagactgagaaccatggctcacgcccgtaatcccagcactttgggaagccaaggtgggaggatcccttgaagccaagagtttgagaccagcctcagcaatgtagtgagaccctgtctctatcaaaaaaataaataaataaaattaaaaattaggccagtgtggtggtgtgcacctttagtgccagctagttgggaggcgaggtagaaggatcacttttccaggctgcagtgagctgtgattgtgctattgctcttcagcctgggtgacagagcaagaccttgtctctaaaaaggaaaggaaagaaaataatccacagacggcaaatagacaagtggtcaggaaactggtagggattgcagggatgcagacagtgctatggctgaagggaaagctcggggaagagggagtagaaggccagcagggcaggtgtgggcctgtctggggtcctctccttgtgttgtggcttgcatttttgtccctccatagcagcaggaaggaacagaaaatgcctgccagagcctgccctgggtccaattctgatgaaggcaaaagctgcctgcagtgctccgaatatgctcagcctctgcctctacctccccaccagcaaggccgtgttttcctccacgcacacctcgagcacaccgctttatcaaaccccattcagaaacactctgtgttcccagcactgatgttttttaaaaatggtgacagtgacttcctcatttgcatttcgtgtttatgaccttctcctgttggcttgacatatagacgtggggcagggcaggagtgcagattagagcagtgctgatattacaatgagagagcaaagacagaagaagagatcgcgttcagcttctggcatttaaaagaggattttgcccagggatctagtgtgacaagccagctttgttgagatttaaaagctatgtaatcatgattcacagtttctttttatctcctcccagagactaccaagagccaggcctggccacctgcactgtggagttttaggttagagatggccccatccagcccaggggaatgcaggagaacaagggagccaggcgaatgcagaggggaaggcaggcgctcagcttctcatcttccctccctgccccctcaaggagtcagttggaggcagctttggaaatacctacaaatgtgctaaaaagctggaaggcagagaggcatctgtcctgcctcctgtccatggctctaggctgcctctctccaccaagctggaggtagctccatcaaagtggaagcagcagtacaataggactaagccgatggaggaaggatggcgttccacgtggtgaacctggaaggtcccacctgaatctgaggctttagggaactgagaagacagctggcatgaggctcagtggctggccataggccttgcaatggccaggggtgaggggacctcctagccaagggcaggtggaggaggcagcagaaactcagccaggtccatggtgaaggtaaaaggagaagttaggcttggctgaagcataggcatcaagcaaccagcctggatgaagctgagacagcagtgggtcagttcctagagctgtgatggccagcagacaggcagaagcaggggagcaaggagcagaggctgggggagttggggggttccacccagatccacctcctttccccagcacctcaagggtttctgatccaaacacgaagtaccttcctggaaagaaaaagaagggagagggaggagagcaagggggatggaagagaagacaaaggaggaaagggaaatggaagagagaaaggaatgtttctgtgatgctcatcatttttatataaagaagctgttacaattattgcatcatacttagatcaacagattaatctggagctgttaatattttttgttatgcagtaagtgggtctcttgaggaaggccgtacattttacattttatctgaacatccgggtgtagcatcagtgactgggatcctgcacatagattttctgtgaatttgactgcagttgttgccccttgcagacatttcagctttataactgaggaaagaacagctgtgaccactggggccccagacaccctgctcttgctaactatctcctctggggtgcagggtgctgtgtctcacagttacagccccccaggaatagactgactacccaccacacatgccactgatgcgactctagcatccgctttgtctggatctcacctactgccccttcatcctcaatggatctaaaggctccccttaccatgaccatgtcacagctaacatggactgccacctgcaaagtgtcagtcataggaccaaatgctttgcaacatcatcgtcatcatcatcaccatcatcatcatcatttttaatcctcacatttaccttagataccaataatatcaacattttccaaatggggaaattaaggcttagagagtttaaacagcttgaccccaagtaggaagtgacagagctgggctttgaatccaggtcattcagctttagatcccataaatgttagcagcttccacaggctatgctgccactaggcaatttggggcttaggtcggccagtggctctgtcttcctgtgcttggaacccgggctcgggcagcccctttgtccaggaacgtgacctgctgcccacccagctgctctcttgtcccacagcactcgttgtagaggtccctgcacggccttccatgataccccttcttcttcacctcacatgcatcactcagacctctgacatcacctccttgttggtagagctttctgtgactccttatggcagcaagtcattccctcctgcatgttcccttgccactgagcctgtaggcagtgcatttcccatggaaacataatggcatatttataggccagtcacctgagctgaactaggagctcctcgcagacaggtgaatgccatcttcatctgtgagtttctagactggagaggatgcggcagagaccatgggctgctttgcttaaggctcatccaacccctgaccagcttgtctttcagtacagcagaggccaagaagcagaaaatgacaggtgaagccaggtcccatgtgtagtttagttcctgccaatcaaaagcattcatgcgagactgattacagactgagctatgaagggcaaaaggcaagggccaaggcattcattttgctggagtggatcttggtttttaaactgtcacagcaatctcctcagtcagacagatctatatagtgtgtagtctatttatatttgtaatgaaaaaaaaagaataaatgtaacaaaactgccctcttaaaggttgtttgttaataacctccaagactcaatttcaatttccatccacttggtctgttaaccatgactctctcactttttcaaagataccaggctttgcattgcctcatatttagatcagaaattcttttaaatttgtcaaggattccagctgttagaaagagagtgggaaatagcaatggagaaagacaatgtaatcaaaaggaaggattactgctgggcagcaaaatccaaaaatgtccactgaaaggttgggcattgttgctcatgcctgtaatcccagcatttcagaggccgaggtgggaggatcacttgaggccagaagtttgagaccagcatgggcaacatagggagacattgtctctacaacaaaagctaaagagctagctggacatagtggcacacgcctgtagtcccagctacatgggaggctgagacagaaggattgcttgagcccaacaggtcaagactacagtgagctatgatcttgccacttgcattccagcctggaagactgaatgatatcaagaaagaaagaaaagaaaaagaaaaagaaaaagaaaaagaaatcaactgaatccctcaaatcaaaccaaagaggcaggaatccaggcttgcatgcagcactcggccttatcttttacttgtatattctttattacgtatctctccacttctaggattctgcgcacctacaatatctctgatgtaccagaaaactgtaaaatgcacaggaaagcccctttggggagcagagtgaagagtgagtaggaagtcctggtagaattttaccagcgaggcaaagggaggctcagtgattgattggagatctagtgagctggcagccaaacctcaggcaagtctcctgacacctgctccattgttcctttactgtgttctttataattgacttctcagtaagagttgacaatggccatagcaggtaccctagaaccaaaaagctgagtctcatgaaatcctgcccagctccaggggcagtcagatggggactgggaatgatagaggatggaaagtttttcatctcaagggttttggtgcatcgtgatgggcagtggtgcggaggacgcatcaacagttgaacgaaactttgtttaagaattgtgtaggctgaaagtgattggtgcttgacagtgctttacccactgctaaaaacaaagtcttaattttgaggtggtgccaacagtttgctccactaggatggcagggagcttccttcggtttaaatatttacattgcattttcagcaccactctcagccttactgtagcaggcaaccacttagtgggtgtttgaagatgacaatgccccacgctcagcccttctttagcgttaatggacaagagcaagctgtatgtcttcttaaataaaacagcagccttttgtgacctcccttttctcaggcaacaccaactcaattattcactcagaactgcaaggaacacttcagacgttactcaagcattcatcatccacccccacccccacaaatcatataaagggaaaataatcaaagacatttaaataatcacaatttttaaaagtataaagcagaacagacagttttattttagatcttaagtgaaagtggattaaggttttccttagaaaacatttattggagaatttcagatgaatttcagttttgccgcctggtgtcgaatcctgctttttaaaccttgtctctgcagagtcacccctttttctccagtcccactctcactgctgttggtctgaccctgtatgtctgtgattggatagacagcaactgtccctaggaaaggcatagcatgggaaagtgtggatgtctcagtgtccctcctgagattcactctatgacaatgactgcatagccaccatcatggccaaaccacacccatcctgcaacacccagcctcttcccaggccctcccgttagcacttggtgctacccattctccgttcatggcttccccattgcctgggtctttgctccaaggtctttgcttttctcaccaagggctttgcttttcttaggtgcatccacattttaaaagcaggattcttatccaaaggaataaaagggaactatccagaaatgtattgaattatagaagtaatgagttggtataaaaacaaaagttcaaatgttgtaagagctcttgtataaaaataaaatgccctcctccctttgcccctcccagtctcactccttaggcagctattaatacttttgaccattcttttttttttgacctgcccctggagctgggcagaatttcatgagactcagctttttggttctggggcacctgctatggccattgtcaactcttactgagaagtcagttataaagaacacagtaaaggaacaatggtgttcctttgcaggtgtcaggagacttgtctgaggtttggctgccaactcactagatctccaaacaatcactgagcctccctttatacatatccctcatacaatatcataattgtataatataaatacaagtaataactctaaataatatgatatgccctatttcttgatttctctctttaaatagtatctatccactttttaccatgaaactgaagagtttggttcatcttctcccttttccctccctcgtcaaatttttgtttattatatttttatctcttggtccttctatgagtcaactataaaaataaataaagaccaatcacatgagaaaagcaaaggctatttattctgagcttgctgtagcaagggagtcagccacccaccgtcacttacattttggcagagactcaaaggcaggcagaggagtaggaaagctttagattagagaacaaggaaggcttcagctatggtcggattgaaggctgctggcatgcggaagctataggtggactaagtagaagtagggtatcctatgtgattagttaggggtgcgtatttggcttcctctggttggtcctaagttggaagcagggataaaaatttaggaagctgtcagttattaaacaagtcctggccatttggggctgacttaggctggctggattgtttatggtagaaaagggcattggtttcctgggcaggttgctgccgatcgtgggtcaaagttcatctacatatatatggcctggccattgcctgcttggctattcagtctctcacgacttcataactttaaacaatagagttaaacttctatttcgtgatcttccaaatgtaaacagtgtttctttctccccattctgtaagatacccacccccaccaccagctaatctccctccctctacctcccagcttcttccagctataccattatttttatatatgaaaagttgtaatcatactatccctttggcatgtgtaaatattccatgatgtgtctataggtcaattttgaaaatcaagagccagtaagcagcatttacaatatcataattgtatactataaatataagtaataacaattttttaaattttattttattttaagttctgggacacatgtgcaggatgtgtgggtttgttacgtaggtaaatgtttcacggtggcttgctgcacctgccaacccatcacctaggcattaagccccgcatgtgttagtaataagataattaaatgatataagtatgatttactagttgaaaaaagtaatgagatttcatccataattgaacttagtgaaagaaattttatatctgtaagcctgtaccactggaagcataatattttaaacatcaatgtaaagttggttctcctttattatacatttttttttctcaaaggcctacatgtcagataaactttcttggtcttgaatatctgaaaatgtcagcgtttctatttcacatctgattgatagtctggctggatacttaattctaagttccaggtgtaggactttgaagacattgcttggttgacatctactatccaacattgtggatcaagtcatctgatatcaatctcattttcatttttttataagtaattcatgtttttctttctagaagctctcaggattgtctttttatcctgttgttctagaatttcaagtggatgtatcctatgggctaaatatttgtgtccacccacctcaccccaagttcatatgtggaaaccctaatgcccaatgggacacaatttggacatagtatttgggaggtaattaggtctttcaggttaagtcctccttaggggattaaggcccttattagaaaagacatcggagagcttgctcccctgctctctgccgtctgccatgtgaggaatcagcgagaaggcagctgtctatgaactagaaggaagaccttcaccaggagctgaccatgctggcaccctaagctcagacttcatgaactgtgagaaatacatgtttgttttttaagccacccagtctttggtattcaattatagcatcccaaattggcaaagacaaggtgtctagaaaattattttggataaagccctgaaatcctcccaccagttattccacctgtgactgaggttggctctctcaccagcattgctataatctcttcccctcagacaaggaatcttcaggtattaattggcaagcttgtcttccaaccccacgcttcgactatgccaatcctattttaagtaactctttgagagacagcttgttatatcagaaggagaaccccatgtgatctcgagggaaggttattcaacctcccaaaacctcaattttattatccattggatcagcggtccccaacctttttggcaccagggagtggttttgcggaagacgatttttccaccgatgggatggcgagggaatgatggttcatggatgaaactgttccaactcagatcatcaggcattagttagattctcatgaggagcacataacctagattcctcacatgtgcagttcacaatagagttcgagctcctgagactctaatgctgctgctgatctctcaggaggcagagctcaggcagtaatgctcactcaccccactgctcacctcctgctatgcagacaggttcgtaacggaccacgggccagtactggtccatggctcaggggctgggactcctgtgttagatggacataacagtactacctcttaagatgtttgtgaagcataaattagagtaaaatgtgaatacaactcacctgccacaaatgataggagttattaggagctaacgaagtgagacaacatatatatatataatgattgtaactgtggcgtgtgtgtgtgtgtgtgtaataaatgtttgtaaactaccatcatataatcattccccaaaacaatgtacttataagaagaaaacctggccttgtccctacataaatggaagaaaacaaatacagcatttttaaagtgtagaagaagcttattagagtggttttcaaaaacataaatgaggccaggcatggtggctcatgcttgaaatcccagcattttgggaggccaagttgggaggattgcttgagcccaggaggtcaaggcggcagtgagccatgatagcaccaccgcactccagcctgggtaatgaagcaagactgtctcaaacacacacacaaacacacacacagacacatgaagattgtggagctccaaagtagatataaatggacaacagaaccacatacaggctaagccacagaaactactatctgggccaagtgtgagcaggtagtgtctgggagggtgtgtggaccctctctgggaaaaaacaagtgcaagaagatgagggaatggggcgttgagaaagaaagtgacctgggagagcaataacaacttctaagctgacaacagctaagatagggaacatagcatgtttgtgtatgcacgtgtgtgtgtgtttatcagtatgtcataggccatgtcaaggaaggagagaaagaaaatagcaataaaagtagaatgcagtaaaataaatgatggcagataaaatatgaaatagatttggtgtttttgaaacatcatcaacaaaaaaaaatgactagtagcctctaaacattttgtgtaaaggaacattttcaggccaggcacagtggtccaagcctgtaatctcaacactttgagaggctgaggtgggcagatcacctcaggtcaggagttcgagaccaacctggccaacatggtgaaaccccatctctactaaaaatacaaaattagccaggcatggtggcacatgcctgtaatcctagctgcttgggaggctgaggcaggagaatcgcttgaatctgggaggtggagtttacaatgaaccaagatcgcaccactgcactccagcctgggcaacagagtgagactgtcaaaaaaaaaaaagaaaaaaggaacattttcagcatatacagaattatagagaacagttcaccacatatattcaccgctcagcttcaaaaactatcaactcatgtcctgtgtcagccatcatccaatatttggtcttttgtgactggtttcttttacttaatttaatgttattgaggttcatccatatcgtagcctgtatctgcattttattccattttaattggtgaatagtattccattgtatggagctaccaaattctgtttatccattcatcacttgatagatctttgggctgtgcctggtgtttggctattatgaataatgctgctatgcacattcatgtctaagtctttcctgtggacatatgttttcatttctcttgggtggattttttgggtggattcttgggtagatttgttgagtatgtttgtgtttaacatttcaacaagctgtcatgctgttttccaaagtgactgtactcttcaatattcctgccagccatctatgagggttgtagtttctctctgcgcactttgcattctctcttttattgtagccatcctagagcgtgcaaagtggtatctcaatgtggttttaactttcatgtttctaataaccaatgatgttgagcatatcttaatgtgctgattagccattcctaggctgtccttggtgaaatgttcactcaaggatttgggccatttttaattgagttgattgtcttcttattgagttatggaagttctttttagactcttgatacaagtcctttatcagatatatgatgtgcaaatattttctcccagccagtggtccattttcttcatattttttgaagtcaaagtttttaaattaattcaacttcaatttatcaatttttttatggctcatgcttttaatgctgaatccaaggatcctttgcctaaagcaaggtcacaaagatttcctatgcttttttctagaattttttacttttagcttttacgttttgggctattatcctttgtgtatgatggaggtacttttttgtcgttgttgttggcatatggatatataattgtgccatttgctgaaaagaaatcccatggaaatgttttgacacctttgtcaaaaatcaatcaaccataaatgccatgaatgcaaggatttatttccagactctaatctgtttcattgacctatttgtctgtctttacataaataccacactgtcttaattaacagggctttgtagtaacttttgaaatggggcagtatggctgggcacggtgggtcaagcctgtaatcccagcactttgggaggccgaggcgggcagatcatgaggtcaggagttcgagatcagcctggccaatatggtgaaaccctgtctctactaaaaatacaaaaattagccaggcgtggtggcagaaacctgtaatctcagctactcgggaggctgaggcaggagaattgtttgaacccgggaggcagaggttgcaatgagccgagatcgcgccattgcactccagcctgggcgacagagcaagattctgactcaaaaaaaaagaaaaaagaaatggagtactagaagtcctctaatatttttttttccaaaattgttttgtgataaagtgatcatttataccagaatttcaacttgcttttaaaacgtggatgccttctctgagacaagcactgtgtctatcatgattgtaattcagtctattacctcaggcagagacatgcatgttcacaaatagcacagccctggttcagccctaaatttcaattgcacacaagtcatacatacaagatgccatggcagacagggctaagaacaactcaatttgctggagttcatttcaggagacttcacgtaggagatggtggctgagaggggccttgaaaaatgggtcagcttcattaagatgagctgaagaaactgatccagggctgggaaggaaatgggtagaggtagcagggcttgaaagcagatcagagaggggtaattttggagaagtggctagagggagaacgcaaggctggaaaagtgaggtgtgcacctcaggctcagaaacctcaggcaatatttggagcagctgagggaagcaggggcccaagggggtaaaaaggcagccaggccattttcctgctctatgcaaaggatacagtcttgccaggtgcagtggctcatgcttataatcccagcactttggaagactgaggtgggaggattgcttgagcccaggagttcaagaccagcctgggcaacgtagtaagactccatctctaaaaaaaatacgaaaattcgccaggtatggtggcacacgcctgtagtcccagctactcgggaggctgaggcaggaggatctcttgagcccaggagttggaggctgcagcgagctatgatcgcctcactgtactccagcctgggtgacagggtgagacactgtcaaacaaaacaaaacaaaacaaaacccacagtctttccccgaatcctgttcaatcctctcaaagaacactctattctggtaggaaaggtacgaggagggagcgtgagccacccacacaaatcttctgctcctacaggaagaataaataaaaccctaccgatgtgagtcgccaataccatcttcagccataaatgacgaagcatttttattgttctttaccctgtatgcttgaaacctggcaggtctgaggattaacatgagccactgtcctgccggagcagaggatgatctttgcaccaccctggcaactcctattaaaggctcaaagcttatgcccttttcttgctccttttccaagttggctgggtgtttttaaaaacttgcctttgcctctagagccttcctatcagccactggtatgggccaaaatgaccaccataagtgtgatgtcccctttttgctaaattttcagactctaatctaaaatggaattgatttgtgtaatgtctgaacccttgagactatttctgcttggaatggaaattgactccattcatgtttcaggagtggcaggctcccagaaatccaacagtgtcttcatcatagattcctgccaacatggttctgcctaataaatatgaacccaggtactggagaccattgatccccatttcagccttctgagagtctcagaacatatgcacaagcaaagcacccacattctggtggctctgggtgcattgtgttgagaagggatttgagtgagatgtgtagggagaggaagcggggcaatgccagagaaatcctttctccatttttatcagatctgctaccttttgctcccttggagattctgagtagatatagttaagaatttttgagtgacaagagttattgatacacatggtcaattggccaacacacagccatgccaacctctttctctcatgagtgacatcctgtagcaaagctgaagaagtgagattcttccttacccagccttccttgcagctaaagacagctatgtgacccagttctagccaatgacatataagaggaagggtgacagaatcttttgcaaaaatgttttctttacaaatgaaagaaaagaggcatttgaggacaagttattttattgttagtttgtgcccctctcccactacttcctgtctcggaattctgttgcaatgtctgaagctgtagtagccattctgtaatcatgaggcctcaagcacaaagatgaaaaaccagcacacagaagatggtggagaaggaaagatagaaagagccccgctctttgatgccatccctgacctgctagtccagcgctagtctggattcctccagacttcttgtttggtcaaataacaagatgccatcattgtttaagccatggttaacagagttttctatggctggcagccaaatatattcaagatagtgtagattctactactttctctcccctaacctctggaagttgcctttacttacactaaaatgtacagaactctcctggttcctgcccagaaaatcaatttattaaaaagagtagctggacttccagtaaaatgctgtagcaatagatgactattagatggaggatgatatagtgatggtagtgggaagggcaggtgcatggctcagggcctctgtgtgataagcagcccttgccttgccctgactgtttcatgagagatacaggaagaccagtgttttcttttttcttttttttttttttttggtccctctctggttaatgagtgggtttaatagtgactacccggaaatatataccccatgcagagctgaagatcaatattactagagggaagggaagaggagtgaggaaggaagggaggagacaaggaaaggaggaaggacaggaggagggagggaggaaggtgataggttcaatacaaacttgaagatatgggggatagcaggggatagaagagttctggagcaacaaacaataccaggattaaaatcagaagctgaggagcaaaatttggctgatgtggtagttgaaagcagccacatgaaggggcaggagggctgtctgaagtgaaatttgtcccgcggggtttgaggatgagaataaaacaatgtctttttttctttttttgaaacagagtcttgctctgtcacccaggctggagggcagtgacataatcacagctcattgcaacctctgcctcccaggctcaagggattctcatgcctcagcctcccgagtagctgggactacaggcacccacaaccatgcccagctaattttggtatttttagtagagatggggttttgccatgttagccaggctggtctcaaactcctgatctcaggtgatccgcccgcctcggtctcccaaagtcctgtgattacaggcacgagccaccatgcccggccactttattttgatatggacagttgactgatgtctcacatcatgtaagatgatctatatattcagcgtccaaccttcaggcacagctggttttcttggagcaacctgtattccaacctgtatgccagagcttccataacaaaactccacagactgggtggcttaaacaacagaaataaactttctcactgctctggaggctgcaagttcaagagtaaggtatcagccagtttggtttcttctgaggtcactctccttggcttgcagatgaccactttcttgctgtgtcctcacatgctctttcctctgtgcacacacatgtctgtgtcctaatttttgcttcttacaaggtcaccagttgtgttggatgagttgaggtcaccatgtgacctcattttaccttaatgacctctggaaaggccctatctacaaatctagtcacattctgaggtagtgggggtcaggacttaaacatgtgaactggggcaggacacagttcaacccgtaacacccctgtaacaaatcgccacagtgtcttaaagcaacacaaattattctcttacagtcctggagaactgtattagtctgttttcatgctgctgataaagacatacccaagactgggcaatttacgaaagaaagaggtttattggacttacagttccatattgctggggaggccttacaatcacggtggaaggcaagaaggagcaagtcacatcttacgtggatggtggcagggaaagaaagagagcttatgcagggaaactcccatttttaaaaccatcagatcttgtgagacttactcactatcaggagaacagcacaggaaagacccaccctcatgattcatttatctctcactgcatccttcccacaattatggaattatgggagctacaagatgagatttgggtggggacacagagctgaaccatatcaaggacagaagtccaaaattggtttcaccaagccaaaatcaaggtgtcagcagggctgcattgcttctgcaggctctcagggagatctgcttcctggatttttccagctttgagaagtctcctgcattatttggcctgggatccttcctccatttcttaagccagcagtggttggtcaagtttttctcactccgtgttactctaacactccaattctgtagtcaaatctccctctgcctctctcatttaaggacacttgtaaatacatttaaggcccacccacagaacccaacgtaatctgcccacctcaaaatccataatttaatcccatcagcaaagtcattttgccgtaaaataatatattcacaaattctggggattcagaaatgaatacttttggaggccattattcagcctatcatgtgtcataaatccacatctgtactgtgcacactgtgcacactgtagctgtacccctgagctggtcgggtgacaccagagttggtgtcactggtgctttcccaatcacaaagagaagaatctgatgagtgtgtgtcatgttctgggggagtggggctgagactagttaataaactcgattcctctagttctgtaatccccatatgccttgcaaattaagtggtttaaggaactcctttaggtccctagagcccaccaaatggaactctcctgaggaccccagtttaaaaagtaatgaggaaaaacagtgaggacaggggggtttgcttgtccctaaagaatcagtcacacagctcagcagtcgagcagtcacaatggaacaccaagaatgtagcactttgctgagtcagcatctgcaaatctgagctgagctgcttctccagcaaagaccagttcccagggtccaccatccacacacttgtttcaggccctcattcctaggtgtgccccggaccaagggcaagccacatggaatgatcctatatgcatttttatgttgatgaaattgggtgaaaatgagagaagactgggagatgctgaaggtagaggaataggcccgtttgcttttctttgatgatagagaacttttgaaaccaaatgtatatatatcacccccatgtattttttttaaagtctcacctaagagatacctatgatcttttcctattttaaaatattttaagcattaagaaaattttagagaattgattattaaacacaagtacattcagtccagctgtcagactttaacattttgccatatataattcatatctctcttttttaataaataaaatacaacagaagatttttagagtagttacactattctatatgatcctatactaatggatacatgtcatgatgcatttgccaaaacccattgaatgtatgacactaagactgaatgctaatgtaaattatggactttggatgataatgatgagtcaatgtagattcatcagttacaacaaatgtactactctggggcaggatgtagatagtagagaaggctgtgagtacatgggggcagggaatatatgggaaatctctgtaccttctactcaattgttctgtgaacctaaaaatactcaaaaataaactttatttaaaatatatatatagactggtcatggtgggtcacacctataattcgagcactttgggaggccaaggcaggtggatcacttgagctcaggaggtggaggctgcagtaagctaagatcacgccacggcactccagcctgggcaacagagtgagaccctctttcaaaaaaaataagataaaataaaattatatatatttttttatatagtgcacacaaacacatataagacagttgaagtaccttatgtacctttctgtaatatcatattcccccagaagtatttgaatttgaggtttattatcccatttttgtctttataattttaccttatgtataaatatctgtaaagaattaactgtatatatagttttgcatattgttaactttgtttcaatggtacactgtgtgtattcctctaaaactcacttttattgttcagaatttgaaatgtattcatgttgatttattcatttatctttaacagtgatacagcaaacagtgatacagtacttcagcttatttatccacttacctattgagagaaatctagcttgtttctagcttttgtgctatcgccaaccatgctgcaaagaacaatgttgtacgtttctgcttatgctcttaggtgctagcttctctgacatagactcttaggagtggaaatgctgggttgtagaaaatgcacatcttcatcattaaagatgtgaccaaattcctttccaaagtgattgtaccaatttacagtcccactaccagtacatgataatcaccattgctccaccaattcaccagcacttgctgttggcactcattttaatatttaccaatctgttcaaaatagaatggcagttggttttaacaaccattacattgggtattagtgagagtgagcatcattgcatgtatgcattggtcattcatgtttcttctgtaaatttcctgttcttgtcctttgaccatttttccccattgggttgttttcctttttctcattgatttgtgagagttctttatataatttggacattaatcctgtattaattacattcattttaaatattggattctattttaaggcttgtctcttaattttattggtcctttgttgcacagaagctttatctttttatgcattgaattttatcagcattttaaatgtttatttatttatttatttttaataatagaggtgggggtcttactctattgcccaggctgatcttgaacgtctggcctcaagtgatcatcttgcctcagcctcccaaagggctgggattacaagcatgagccaccttgcccagccatgtttatattttttaaggattatttaagaaagccctcttggctagcatatctcaatgatgtccttttaattttgaaatgatttttacttttttcatttagatgttaatctccttggattgattttagtgtagggttagggacctaattgtgttattttccttaaggaaaaccaactgtctcagcatcatttattaatttaaaaaaaatatttctccagtactctttattaattttttgaaatctcccaattactttaatgcactgtctctgccatttgtcaagtggtcagagggagcctatttccatgctgattctgttccattggtctatttgcctgtccctgccatcacgtcttctatttattactgtggctttttaatgtcttagctgatagagcaaatctctctaccttgttcttctacatttgtctttctttttttgacccttgcttttccaaataaattttggagttggtttgttaagttccagagacagaaagattctctgctcggattttaaaattaatttggggaaatttatcaataaattaggggaaatgtgatacctgtacaatactgagtctttgccatactatcttactctttaattttaaattttctttttattaacatgagtccataatccttatctgaaactcttagggtaagcatgtttcagaattcagaaattttcagatttaaaaaaggcaaaaggcaatattatctctgtataatatgttacatattatctcccagtgtcaatgctatttacgattttcctcttattttggttgagcacattctcaggtatagtgctgtgcaatagaagttctgcagtgatagaaatgttctatatctgcgcaatcaaatcaatgctcgggctgggctcagtgctcgcacctgtaatcccaacactctgggaggccgaggtgggtgaatcatttgagcttagaagttcgagatcagcctgaccaaaatggtgaaactccatctctgctaaaaatacaaaaattagctgggcatggtggcatgcacctgtaatcccagctactcgggagactgaggcacgagaatctcttgaacccaggaggtggaggctgcagtgagccaagatctcaccactacactccagcctgggcaacagagcaaggctgtctcaaagcataaatataaaaataaaaataaaaattgatgctcactagccacatgtggctatggagcatttgaaatgtgggtaatgtaactaaggaataaaattttaaattgtgttgaactgtaataaatgtaaatttaaataagcatctgtggcaaatgcctaccatattagacggcacagcactagtagtttccagagaaagggttcatgggagggaatgttttgagtccttacactccaaaaatacatttattctaccctcacacttaattgatggtttggctgagaataaaattctaggttaaaaaataattttaccttaaaattgtgaaggtattgcttcatatctccctagcttccagtattgctttttgcttttttttttttttttttgacagggtctctatcactcccaggctggagtacaatggtgtgatcatagctggctgcagccaggaactcctgggctcaagtgatcctcctgcctcagccactggagtacctaggaccacaccacaggtgcatgccaccacactcagctaatttttctaatttttctgtagagatggggatcttgctatgttgcccaggctggtctcaaactcctgggctcaaatatatctctcaccttggcctcctagagtgctgggattacaagcatgagccactgtgccccacctagtattacttttgagaagtcaaaagaacatcttaattccctgtttgaggattgtgatctgcttttgccctctgaaagttttaaggttttatctttgtcccaagcatttttgggcttcctgatgccatgctttgttgtgggtttattctcattcagtgtccagggcatttggtgggccttttcaatctggaaattcatatccttcagttctgagaaatttccttgaattatctcattgattatttctttcctttgttattttctgttctctttctctagaacttctgttattcaaatggtggacattctgtaccagtcttctaattttcttatatttttctcctctttccatctatttgtttttactgtgcttcctgggaaatttttcaggtatattttcccagactttctattgagtcttaaatttgtgtcttcatatttttaatttctaactggtattatttttgttccccaagagctctctttttataacattttttcttgtttcatggttgcaatattttcttacctctctaagaatattggtagatttttaaatgttttcttctacctgtttcctctttttctgttcatctgcattggtttctacacaactagcttgaggctttccttgacagctggtaatccttggttgtcaactcatatacataagagttggggaaggaaatgttcttagaaagctctgagtatatgtctggggtttggcacccattaacctcactgtggaatgatctggctaaaccatttagttgggaaacctgatgtcatctgtatctttaggtgtttcctccttgcctgttgagattcttcacagccgatggttccaatctcctgccagggaggcattggcctggctgctatttttctgttattccagagaagaacgtggacagaaggcttcagcatccagtgtatatggcttactaagtcctccctcccctttccagttcgatacttctgtacttactccagaaactatcttcagtggaaaaaccttgaatcttctgccagtgtgaggggattgtaggggaagatctatggatctgatttttttttcttttctttttgagacaggctgtcaccttgttgcccaggctggagtgtagtgatgcaaacatggctcactgcagcctccacctcctaggctcaagcaatcctcccatctcaccctcttgagttcctaggaccacaggcatatgccatcatgcctggataattttttaaacttttttgtagagatggagtctcaccaagttgcccaggctggtctcaagctgctgggctcaagcgatcctgccacctcagcctctcaaagtgctgggattacaggtgtgagccaccatgcctggacactgatttttaaacagcctttcagataaacctccttactttagcaatctttttttattccatattctcaaaggtgcctgatgccaccaattttggggttattgggtcatttcttctgtgttacagatcaggtctcaattttctccactgccagctttgaattcagttttttgttttgttttgttttgttttgagacagtctttctctgttgcccaggctggagggcagtggcacgatcttggctcactgcaacctccacctcccaggttcaagagtgaattcagtttttttggctctgctaagccgctttataagcatttctccaattttcaaaatttggaaatttttatcttctattgttatctgttatcttctcttcaatgctcttcatccttatgggtttatgtcttcagaaaacagtctctttattgccatttttgtgaagttttgagaggaagaaaaagtcaatgcatttgtttcccattttgtaaatgccagatggcaaaccagtttcctttcttcctccgccctgcaaaattggctgattccaaagcacagcgtctttaaatgcacaaacattattatttttttttttttgagacggagtctcgctctgtcgcccaggctggagtgcagtggcgggatctcggctcactgcaagctccgcctcccgggttcacgccattctcctgcctcagcctcccaagtagctgggactacaggcgcccgccactacgcccggctaattttttgtatttttagtagagacggggtttcaccgttttagccgggatggtctcgatctcctgacctcgtgatccgcccgcctcggcctcccaaagtgctgggattacaggcgtgagccaccgcgcccggcccaaacattattattaaacagctacaatgggtcagtcctgtgcttgtcactaatcagggacaaatgaatagacattgaataaaaggttgctgccacatgaaagttctaaagcaagacatttaagctgactgtctggagtctcctggctcctgaggtccccctgactcttgtccactatcctatgtggccatgattagctctcctgggatagtagcctgttccaggttctgggctggtagggatcaaacacatttgatctaaatcttatgagcactctgctctgaccaagtgctccaatgaaaaagtatagacttttaattctagctcaccacaaatatttcccacaaacatcaaatgaaagaaaagggcagaagcaaagtatgttaaatataagtctattgagtcactctcattagtcaccctgttttgtttgtttttttcatttcaaaccctatcgaagtgaatggagtcgttcttaaccaaggtaagccatagggtcctaaggacccatcgtgtgtaattaatatgaaatgttgacgattcacttgttgaaatggcatattcaatgtgacataaaatataaatgaacctgaaactacatggattgctgcagactgtaggccactctgaatgggtgctttttgtctgaagtctatttttaatatattttactatatatcaagcaatatttaagcactttacaagtattgtactacctgattcaatctctgtaacattatgagagaagtacaaccagtatcctcattttacatatttaaaaaaccaggcccagaaaggttaagtaactgctcaaggtcacacaattagtaaaagaaagagctggctgggtgcagtggctcatgcctgtaatcccagcactttaggaggctgtgaggtgtgaggcttacttgaagccaggagcttgagaccaggctgggcaacgtagagagaccctgtctctacaaaataatttaaaaatcagctgggtgtggtcgcacatgtgtgtagtctcagctcctcaggagtctgaggtgggaggatcacttgagcccaggaattggaagctgcagtgagtcatgatcatgccaccacactccagccagatgatagagaccctgtgtctaaaaaataaaataaaataaaataaaagagctgagattcaaaccttagcagtctaactccaaagcctagaaatgtatggactcttatgtgcattactctaagctaatagttctcaactggggacaattttgtcacccagggaacctttggcaatgtctggagaaattttcggttgtcacaacttgggggaggggattctacttgcgtctagtgggtagataccagaaatgctgctaaacatcctataatgcccaggatagttccccacaacaaagtgtctggcccaaatgtcagtagtgccaaggatgggagagcatgctggtgtgctagtcactgatgctcttctcccagttttacaagttcttcctccaggcatatggtataatttgcatttcttaaagttggtgtaggcatatatcttgcttgggccaatgtaaagttgctgcacttctagacaaaaattttaaaagccagggcataacaccatgtatccttttttatactttggtcaccttggaagtcttagaaacacagagatgggacttccctctgccttcgtccttatgtgaggataaagcagaagagaaccttaagaatgacccatgacagaagcttcctgaactataaatactgtttgtactaatagttttaagccgttgagatttggaattgtttctgcagcataactcaggctaccccaactgatgaggactccatcctcacataagtacatatgtccctgtctcatgtaacctgactcaggtctttctactcatttcccaggttcctcacaaaggtgaatgatttcctgctgcaaagactgtgaggcatcatttttccaattagaagtgttgctttgtcattggactacatatatctggataccataatgataatggacttgcttcccttttaatttcatggtaagcctctgacagaagttgcatagtagttgttgtcataacaaccatgcaactcagattttccaaattaaagcacatacttgctagtctcactatacctcaactagctctagtgaggtcagaatgactaacatcatcaaacctaggattacacgaaccttaaatcccaggaggtgtgggcagccattagtcagagtattcaactttattcacaaattttcttgatgcttaagaaatctaagtgttctggctggttgcagtagctcacgcttgtaatcccagcactttgggaggccaaggcgggtggattgcctgaggtcaggagttcgagaccagcctggccaacatggtaaaaccctgtctctattaaaaatacaaaaaaattaaccaggtatggtggcacacacctgtaatcccagctactcgggaggctgaggcagaggaatggcttgaacccgggaggtggaggttgcagtgagccaagattgcaccactgcactccagcctgggtgacagagcaagactccatctcaaaaaaaaaaaaaaagaaagaaagacagacagaaagaaaggaaacctaagtgttctgagtttacgatttgtagaccttacctcatatatcaaattattctacctggtgatgaattggaatttcactggagtttcacccagtatgattgatgagatatgaatttatggcaagctgacaacataaattaataaataatccacataacagtttattgtttcaactaatgaaaaatctggatactcaatgtaaaacgtatctagattataaaattgatatcaaatggatatacaagatttgtggaatccagtagccatggagagatggtagaagaaaaagaccattgctactacttctccgtggaaaaaaaagcttctgccaggagtatctcattaaggtccttaaaatgccagtcttctcctccctccaacctctacataattttgtcatactgttcttctagtttgaaatgccatcttatctcctctcctctcacccaaatccagcaaatccctccttaatatcaagttcacgtttctcctcttctgtgaagccttctaagccaatactacaacctttcctttcttagcatttataatatggaccatgtattttagtactggactgtaagttctttaagggaagaggtctttgcatataaatctttaatttctacacagcaagataacttatattcattcattcaacagattgagcatttatatcctgagttagacccagtctgacaaaggcactgacatggaggagctcatggtctgatggggataacaggtatggagatgcataaatacattatggcaagtatataaaagagctaaggctgtcctgtggctgcctgaattttacttgtgttccatgcatggttctgttggatcaaggtgggaacagcatacaaagtatgggacacacagggaagcctgacacacataaccaaggggtcctgaagccaaaaagcgagagctgatcagtgtcaagaggataaaagccatcatcaaaagttacagaaagtcaaggaaatacaccaagaaaggcaggtcaaggtggaagcaggtctgggagcttacctatacctgttccagttactgtggctgcataacaaattactttcaaaatttagtgacttcaaacaataaatttaattttgcttatgagtctgaaattcagacatggcttagtggggatagcttgtctctgctctgctcaacgtcatatgagagggtttgaaggctgggaactggaattatctgaaggtccatttacaagcctagtggctgatgctgcagagactgaaacagctgggggctggaacagcttggactcctggaactgtctctttgtcgcaatgtggcctttccagtgtggtctctccagcatggcaccatcagggtagccaggtgttttggttccctaccgctgcacagcaaatcaccataaactgtggcttaaaccatgcacactcatgtcacaggtcccatgggtcaagcataagccatatctttttttttttttttgagacagagtctcgctctgtcgcccaggctggagtgcagtagcacgatctcggctcactgcaagctccacctcctgggttcaggccattctcctgactcagcctcccaagtagctgggactacaggcacccgccaccatgcccagctaatttttgtgtattttttagtagagacagggtttcaccgtgttagccaggatggtctcaatctcctgacctcgtgatccgcccgcctcggcctcccaaagtgctgggattacaggcatgagccactgtgcccggccagcttaagccatatcttttaactggatcttctgcttagggtctcacaaggctgccattaaggtattggctgggctgcattctcatttggagactcaaatgggggaaacctgctcctaagctttttcaggtgtttggcagaattcatttccttgtgttgtaagagtgaaagacccagctttggctggttgtcagcatgctcagcttctgcccagattcaagggaatgggctatagatctcacctttcatggaaggcgtatccatcatgttacaggaaaagcatatgggagtgggaatctactggtttagttacctctggaaaagacaatcagtcaccgtttgccgtttggccacaacaattcacatcactcccacatgcaaaatacatttatttcctctccctccatctttgatttgtctaccaagatatggttcaagggagtgctgctataagttaagagtcaagtggaaaacttttactactacaatctgggagaaaatatttcaaaaagaggatttttcacctgagttgaattcagttagtgctatataggaaggagtttgttaaatgagtgatattcactttaataccattgtttgtaaggtctggtattgctctctgctttatttgtgtctgttttatctccctgacaagactatacactttttgaaaatagagacactgtattttgtgtcttctgtactccttgagtagtgctagtcccaagggagagactcagctcattcctacaaaatacatgaattcctcaattccctgaggccccagtgtataaattactgccaatccttggaaaagtctaacttgaaaaggcctctatttaccaagtccatgaatcacaacagccctgtacatcaagaaatgcagtgtgatttttgaggtgtctgtatgtccagtgaaatttcttccttttggaatgtctccacaaggagtagaaggaaaaaagacaaacataacaaggaatttgactgtgctcacacaacatttggatagctgaggggaaggtttagtcttgcaaaatgtcttcaagggcctccttcctcccatcccaccccatccccagtggagataatttgtagtttgaggcgttgagctggtgaggtgacttaaagaacaattccatttcttcattgtatagaaacatcttaaaagagatgttcagagtcttagatattgttaaagaagatttcaaataaaagctaaccaaccctgagcagagctttgatgaaaaaattttcccagctgccttagtggcttatgcctgtaatcccagcactttaggaggctgagacaggaggattgcttgaacccaggagtttgatataagcctgggcaacatggcaaaaccccatttttgtaccaaaaatacaaaaattaacaaggtgtggtagtgtgcatctatagtcccagctactcaggaggctgaggtgggaggatcacttgagcccaggaggtcaaggctgcagtgagccaaggtagcaccgctgcactccatccagcctgggtgacggagcaagatcttgtctcaaaaaaaagtttttttcctcaatgcatcctaccttctcacttgtgttatttttttaaaactcacctctccccagagtcacctcttcccagactattacaaaatacccttctggctggacacagtggctcacacctgtaatcccagaatttcggaatttcgaggtgggaggattgcttgaggccaggagcctggccaacatagtgagatcctgtctctacaaagaaaaaaaaatgaagttagccaggcttggtggtgcacacctgtggtcctagctactcctgaggctgagacaagaggattgcttcatcccaggagttaaaggctgcagtgagctatgattgcaccactgcacgccagctggggcaacagagtaagattccatctctaaaacaaaaaccaaaacaatcaaaacactctcctgtatttaaccataagttctcttctttctttctcttaaatacgtacaatctacttgaattttattcaggtgaaagtgggaatgactgcaaattgcccaaagctagattctcaaactcaaaagtgtctaagaatcatctaggcagcttggtaaaaatcacaggtccctggccctaccccaaacccctgaaggagaatgtgtgcatgaaggagctgaggaatatgtgtttgttgttgttgttgttgtttttgagatggagtctcgctctgtcgcccaggctggagtgcagtggcacgatatcggctcactgcaacctccgcctccttggttcaagtgattctcctgcctcagccccccaagtagcttggattacaggtgcgtgccaccacattcagataatttttgtatttttagtagaaacagggtttcaccatgttggccaggctggtttcaaactcctgacctcaaatgatctgcctgccttggcctcccaaagtgcagggattacaggcgtgagccacagcacccaacgaggaaaatgtgtttttaatgaacactgatctagaggtggtcttgttctctgtgttttctcagggtcaccactaagtctgaggggagcagcttccaatgctcgcatagctaattttcttttccctcctccacaccccaagtttgcctatgagaagaacagaaaacaaagggtagaactaattgacaaagatccttcctgctctaacatctatgattcttttaattatatctgcccacaattcccagatgttcatagtctccccaaaagaagggatttttctcttgaaaccaagctagacagctacaaatatgttctaaatttcacaggccctgttccctatggaaacacttatgattaaacccaattcccaattcaaattaaaatttagcattagagattgaaatgaaaactaaagaggatgatctcaaagttgctaatttttcttccctcccagggtccttaacaccattgcagttttgctaataacataaggatgtagtagcatcctttgctaataacatcatcttgcatcctggataatcttggccctataagcatccgggggataaaaacacttttcactgcccctgtggtcaatagcttctgtgctgtccactatagacccatgattatagctcctggacaatctcattgacagcactgacctcaatggatctgactgtttcctattagtcctgtggtacaacagctcattcattcattcattgtgccaactattcaaaggatgatgagggaaggctggaatagcagatatgtctctgttcttcaggagttcacgagttctctatccataaggatagggggcatggttggggacccactcctttcatcatgggtaaagattggggacaaacgagaaaagaaaaccaggttcaagaaattcattaactgtttccatttattatatggatcattactactaaaatagacttagagcatcaatcctatcattttgcagatgatgaaactgagactcagagagatggagtaatttgcccaatattacacagcacgtatctgcagcctcctaattcaggactccttctgctatagcaacaggctaagagaagccaataattggcttatatttgccagctgttttcatcaaaatcttcctggttacccaaagggaaaaatggctttctacattttgtggtaggtcattctagaaaagaaagatgctaatcatcaccaaccataaaacaagaaagtaataagccttccagattatctcttccaaccattctcctatagatctggaccatgaggcctagagggctggagcttcagctctcaaggctatgtgggagaggcagagagattggaatccagaatcccaatccctggcaaatgaccactaccacactgctgcatctctgaaaaatatatcttggtgttgacccaaaatatatttaaaagctttgtcacatttttttaaatgtctatatgtgtacgccaatgattgcacaatcaatgctgtgctttgatctgtcacactttggtccttagtgctggtacatatctcaatggtgacaggagtgacattcaaggaaaaatgactcaaagatgctttaaagtttcctaagaagatgctctatatatgaatccctttagcattatttcagaactcaagaacctttagcagatttcatatttaatataatgtcaccactagttcaaaatctatatataataagatagaaaagggcaccactggtgctgaaaatgtcacgttgaagagaacaacgaagaacacacaatcatctacagccttctcactcagcgctgtcaggaaccaacagcactggcaccaccaggagcttgttggaaatgcaaaatcttgggttcaccccagacctgctgaatcaaatctttattttcacaagatccctggggacttgcatgcaggtaagatttgagaagcacaggtctaaggtatttctctatcaatgaacagagcaatgggtagagcagaggagaggcccagaaactcagagttctggtgttccttgcatggccgttgaaaactgtccctaacctctctgggtagcagcttcctcaagtataaactgaggctctggttgaaaaggctgttgtcataagctgctgacacagagcttttttcagtcccaattgtgtaggacagcttgtgtgatgagaattgaatgacatgcatatcacacatttggtatgctcaatgaatgctattaataaaattgtgaatcacaaatgttactcccatttccttcccagctcagggaagaaacggtatgcatgacatgatgcattgaatggggcagcctacatctactttgcctcctgagaatatcctgagcatcaggccagtgttggcttcgccaggaatcctaactcaggtcttgaaagcaagattgttgctgttaaaaaggtgacatgggatttttctgtttcctcattacattgctttagtttctccctgcctgaagcttctttaatctgtaggctgtgggcaccacctttaaagttttgactcacattatctatcccaaagtaaataatgactaaagtggtggcaaagtcaacacattctttgaaagacaatgaatctgggtgttgaatgaaatcagatgccaggaatatatacattgttgttacaacgctattacacaacaggccttagaagaattccttttctccaggtaaaaactacccccgtaccagttactctgggtgaagaaaggcgtctatgtttggcaaggactaaggaatatttgacttcatgaatcaataactattctcaaagctgctattgacctctgatctgcaaatctgtcagcaaagagagattatggtaactatactgctagtaaaatgcaaacctgttggttaaacatttgctgaaagccctgctagtgacccctgttaaagtgaaccaaatttggccacgtgttcttgcaatgttctggaacatcagagaaaaataactgcctgacccaacacagcttagctcctagagagctaagagatttctctgggccagaagcgttggcagggatcattcctttctcagtctctctcttctaccactgggcccgagttagtgggatctgttaggaggtttttgaataataatgactgttctcaatccttctgaagattctcaaaattaatttcttctcaagagtgcttctaccccacacaaagaaaaggtgcaagaatgttttttcttattccttcatctccctcaatgcctatcatagtgtttggcacacaataggtcttaaatactttaaaaatgaacaaagtgttctttccactgtgctccacctatacattgtacaaccatctacttgaacacttaccatgctgaatttcgtggtttatttatatggctatttcacttttttatttttattttttgaaatagattcttgctctgtcacccacactggagtgcagtggcacgattatagatcactgtaattgcaaactcctgggcttaagtgatcctcccacctcagcctcccaaagtgttgggattacaggtatgagccaccatgtccagccagctattaacctttctgtgttatgtctttcaaaagaaagattctttgtcctattcatcattgtttctccatcacttgttacagaacccaagggttatgggcttggttcatcctttctgaggaagtggggtagcagatgatagcaagataaccctcgtttgtaaataccttagtgatggacttaacaatctcttctttaaaaatataagtgcaataagaccttgactaaaagagtaaggttcagaatttcctcataaaaggttcagctacacgttaaaaggagaattggattccaaagtttaaagtgattctatgaaagcctttattaatattttctgtgttcactgaaggaaaatgagcagctgagagcatactaaataagaagataccaatgatgcattacacatctttaattagtactaatgcgtgctatgtaattaatccaatttagcatcccttctccactagaaacatctctcttccctgcagtctccacagaatggtataaatgtgtcctgatttactgcaaataaggtgctttcacttcctcacagtggttccctgtcatgcaaatgctctccactttctgttcttgtgagctggggctggtcccctgggtaacctacagaagacccagacgatttggggtaactttggtttcctctagttggcctagctcagaagacatttctcaagttccttttccaagattacgcagattcgactccatccctgctaacttaaaagtccaactacagaggccacccgttccccactcgtatctcagctcctacctcgtaacagacaccagagtacgctccaacttctggcctcattttccttcaatataattagccgcacataaatgcccttctttattttctaccactagttcccattctgagagttgtaaatcatctcagctcgaattgcccctctttcgtaatatttcaagttgggctattaaccaaccaccatcccttattctctaaaacccaggcaatataacatgacagttgatgatatagcgaattgctcgtttgaccagggacttgagataatacagtatacaaagttgagcagtgactatctttttgatatagtagcttaaaaaatcacttccatgcttcagaatgcaaagcaatgtgcatattgcattacatactctgctaagtcaaaaaagaagatgagattcccttttccaccccaaaatgtattcaggaaggataagaaaagaacaaaaatgactatagaagaagacaatagcagagtctagatcaaggactaaaactggctataatcaatctcacaagaaacaaaaacgaatgtatgttcattgtttcttaggagcatgaccttttggagaaaagtctggaaatctgacctttggcagaaaagatgaaaaactgatctaacaccatttttctttgagaaaagctcttctctacactatatctgaagagcaaaacttgaactcatctatgtcagggccagggctgtgactagccatataatatttctgtgggaattttttttttttaattgctttctttcctccagccagatgcaacccctcaccaggcacgtggcctgctaaattgaatacaagccacattttagcccctttatcccctcagccaaaaacctttgagcagtgactaaactgcaccatctttcataacaaccctcattaacaccctactcaaattctttcaatggtttgttactgctctcaaggtaaaattcaggtttcatattgcagccccaatctcactctcctctcttctggaactgtgatagacaaatgtgagactttttaattctgtcttttgtatcttgttatgccccttttatatttttcatctcatgtgctgcattctgcataatttctccagccctgtcttccagttcattaattctctcattaaccatgcctaatgcttaatatacccactaagttttaaatttcaatcacttaattttttgtctctgtaaattcaaattttaaaatctgctgtatcatttttattattttctataccctgaaaatattttccagcttgtctatttgtttgtttatctgtttctgaagtagtaggcttagtattgtaagaaatcctttttttcttttttcctttgagacaggatcttgctctgtcgctcaggctggagtgcagtggcatgaacacaactcactgcagcctcaacctccctggactcaagtgatcctcccacctcagcctcctgagtagctgggactacaggggagcagctaattttttagtgttttatagagagagggtttcaccaatgttgcccaggctggtatcaaacttctgggctcaagcaatccactcgccttggacttccaaagtgctggaattacaggtatgagtcaccatggctggccttaggtaatttcaatatctaaaattttgtgggtctgttctgctgtgggttgtttgtttttctttttagtgtttattcattcattaatttattactgtgagctatgcattttccttagaaaattatttgagggaattgcttgaggcctcagatgaaggtggggttctctgatatttacatttgcttctgtcaggttcctgaaactattaccagtctggaacaattctaaaatgagtttatagcttgaggttttctggactgcctgggtgatgtgaatttgggctgcaaacccatgagaagacttgttttccattatagtgtccttgggccagaggattgattcctcctgatgtgctcaggtccaagaagactttcctggaaggcaaggctatttctggttcatcattaaacatgaaaggtatagtcctttagggcctcaaggttgtgtgtggaagatcttacattagattatttgcttgagcaagccctgggctttgttttttgtgctccttcatccaagggaccttgacaactgaagtccaatttcagaaagcactctccatgttctatatattttggagggtttctccctttatgtagatttttttttattttcataattgagattttattggttgaggatcagtacagacatttcaatttgtacacaattcttaacatatgtaatgaaattctaaaaagccatgtattgtaattaattcttttttaaagttattccagtgactttccagcttaaaatttggaagcaaattttccttaagaggctatcaagtactggtatcttcacacgttggtcagctgttacatacagcccacctgaatagcacatacggccacaactgaatagcacgtacactgcatattcatatttgtaatctttcacagcacagtaacaatgttattaggaaaacaggactaccaaaaccaaagatgttacagagtgcacacaattctgacagggagagccatgatcagagtggttttctttaggaaacaattctactaaaaaacaacatgggaatagaagtaatttaaaatgttcaagacattaaacacaggactgactccatattgccatttaatatgctttgtattataggatataaaaactaaccccccatctatggaatattaagctgacacccgagatagtcagagcctcccgtaattcaatatcccacactattttctggttgtaccaaaaaagaaacagccagcaaatgatttcacctcttaaaaaaaagcatttacatttaaaaaaaagggatgaggtgggattccttccttcttaaaaatgtttcagccgggcgcggtggctcacgcctgtaatcccagcactctgggaggccgaggcaggcggatcacctgaggtccggagttcgagaccagcctgaccaacatggagaaatcccgtctctactaaaaatacaaaattagctgggcatggtggtgcatgcctgtaatcccagctactctggaggctgaggccggagaatggcttgaacccgggaggcggaggttgctgtgagccgagatcacgccattgcactccagcctgggcaacaagagcgaaactccgtctcaaaaaaaaaaaaaaaaaatgtttctagagctactaaaaaatttgcatttacagaatagctgataaaaatattcctctggattgtacaagaagggagacagggaccactgataagacatggtatatggtattaatcagacttggcttctttctctcctgcttcatcagaggctggactctcctcagttttcgtttccccattttctgcaggtaaatcttctttagtttcttggttagccacttcagtctgttttccctttgctccccttttcccttttgtttgcacttttttgtctgaagatttatccttcgctgctgcctttttcggctttgcttccacttttgcaggaggtttagctgacaaccgtgctgatctcctcttgggctcttccttggcgccccccaccccacctttatgtagatttttaaactaactcaataatgctagctgggcctggcacagtggctcatggctgtaatcccagcagtttgggaggccgaggtgggcggatcacctgaagtcgggagtttgagaccaacctggccaacatggtgaaaccccatctctactaaaaatacaaaaattagccaggtgtggtggtggatgcctgtaatcccagctactcgggaggctgaggcaggagaaacgcttgaacccaggaggcagtgattgcagtgagccaagatcatgccgctatactccagcctgggcgacagagtgattctccttctcaaaaagaaagaaagaaaaagaaaagaaaataataaaataagtgctagctgcaattatttctactatctttttttggttactcatgaaaacagtctacttttaaaaagcatgggctaaaaaaagagggggctagaaactatctggaacagtaaagtatgtcgatgttttagcttttcttttttctgaaaatatgtgtgatgtgtttagatgagaaccagaaaaaggcttttcactgtgtctgtactgttattcttttcattccatggggtgttactttagcacttaactagagaagatgtacacacagttatagaaagagctcggggctcctcatagcccatcagattccaccatttgatttacactgagtgaaatggattataaacatttataaaagtcaccagagcaaaggaataaagtgtcctgaggagcaccaggaaaagaatcaacattttagactagaaatatgctcaccaagtatctggggagtaaaatgcaaaccacagtatgtgcagtttggaaatattgtatttgttttacatatcagcctttacacaggtcttccaaacttgcagacctgggctttagttgatttccactcatgcaggccttactcatcatcatttcaaatgttgccatcactatatattaccatcttccactgtggcttatatatcatgctgcctggatcagggatgttgtagaagtgagtttgctcctccagtggatttcaggccaacttttcctatgtcatgtctaaagccaaaaaaaaagaaagaatgttataaaatgggtaacacttccctatactgatgctgcagtatggtggttatatacgtgaaagaaaaaaaactgcaacaaaacaaaacaaaacaaatgaaaacctgttttgttcctagtgggataatgcccctgtgctttgtcagccagccatggcataactgccaatgtgctgtcagtcacatctgcagggagaaagagcatgcctgtgtttatttgcatgacttggttattttttaagtctccccaggttattgtaacatgttggaaaggctgagaattgctaactctcattattgtggagtaaattttaatagcccttaggcttgacaaatcatgtttctagctgataataggagagatattattatccccaacttacagatgtcgaaggcaaggctcaaattatttaaaggcctattagggcttaagattaatcactgcttaagtaccaaatgaaataaatgcctttgaggagagcacacttccttaacttttccttcatcttaaataaaggaccctggaatcagatatgcctagaatagggaaggacttcagctgtaatgaggaaactgggaatcagagagccagagcttatcttgcccatctttatgttccctgcactgtctcatcccatgagctcaataaatatttgataaactaaatgaaatgaggtgaccaaggtcacacagcccccacacctagcttccagcctccaatggcgctatacctgctccatacctgctccccctacagaggttatctgtccctgtgtagctgtggagaccacacctcctaccttgtgtgggtgagtcaaggtttcaaatggtctgtctctttcttcccaaagtacacttgttttgcttttccagcatgtgcaatgatttttttattctaaaactatggtagctgtccacgacagaaatacccgtcactaagtcagggtctagagtccccaaacatcgccctctccttccattataacactttttaaatgtataagaaaagcaagctggctcatgcctgtaatcccagaactttgggaggctaaggtgagaggatcgcttgagcccaggagttcgaggccagcctgggcaacatagcaagacctcatctctacaaaaatatcaaaaaattagctgggcatgatggtgcatgcctgtagtcccagctactcaggaggctgggtgggagaatagcttgagcccaggagattgaggctgcagggagccaggattgcaccgctgctctccagcctgggcaacagagtgagaccctggctctaaaataaacaaataaatgaaaattaaaaaaaaaaaaagaaaagcaagttcataaatgctcttggttttgtgcaggaattgtttactcattcacacaggggcctgtctctgtaccagttacaaagagccatgaccgggaatatctctgaggttttctcttgcaccgtcaactttctggtttcttatgagttgtgcttctcctcaggtttcacatgttattctgtttctccagccctgtctgtggacaatgttatctctcattcacacttttgggcccttaggcactgtgcaacctcaaccactgcctcctcccataactgccactgcattcatccccaacccggtccacctagttcacctccgaaggtggtgggagtgaagctggcctggggttttcactgtggtagactgtgggggtctctgcaatttgggccacagggagagtgaggggtggggcagacggagaccaaagatgaggagagagatggaaattgtttcctgagctgtgaggagctgcctggactttgggaatgtaaggagagctagaatattctgttgctgttgtccttgagtgcagcgccctgggtcggggagccatggggagggaggtaataggtctggatgacatgccaccatcaactagagaagagccagcctatcaaggaacccaaaagaaagtggattagcaggctgtgctgacagaccagtcttgaagagagggaggtctctcaacactgagatggcattcacggacggtgcgtgtcccgtcactcaccctccaacgcaaactcccagaagacgaccactgccttggtgctgggcacatgagctcagaatgtatgggggtgtatgtggcatggagtgcagacactctgttgtatagactcggagacaaaaataatcacggtgtggactgcattaggagtagggagtcaggcttgcttgggttctaatcctggccatgtgacctcgagctagctcctaaatttctccaggcctcagcgtccttctctgtaaaatactgcctactgtaggccgggcgcggtggctcatgcctgtaattccagcactttgggagaccgaggcaggcggatcatgaggtcaggagtttgagaccagcctggccaacatagtggaaccccgtctctactaaaaatacaaaaaattagctaggcatggtggcgggcacctgtaatcccagctacttgggaggctgaggcaggagaatcacttgaagccgggaggcggaggttgcagtgagccgagatcgtgcctctgcactccagccccggggacagtgtgagacttcatctcaaaaaacaaaaacaaaaacaaaaacaaaaactgcctactgtagagggtgattgctgctgctatgattttatacaaaaatatattaaattccccaggtatagatttttgtatttggtactaagataaacaaaagagatttaccaaaaaaatcacattctgtgcatgtaacaaatactcacatgtaccccataaataagtaaaatattatatatcaattaaaaaaagacaaagtacgtgttcttccactgtgcattttgttatctggaaatccataatagaatatgaagatatttactattaactataacccttaaggatactttctgccaggtgtgttggctcatgcctgtaatcccagcactttgggaggccaaggtaagaggatcacttgagatcaggagttcaagagcagcctggtcaacatagtgagaccccatctccacaaaaaatttaaaaaattagccaggcacaatggtacatgcctgtagtctcagctactcaggaggctaaggtgggaggaccgcttgagtccaggaggtcaaggctgcagtgaggcataattgcacgactgcatgccagcctgggtgacagagcaaagccctatctcaaaaacaaaacaaaacaaaacaaaaaaaattttctgaattgtcaatataaagaatactgtattcagtataatttactaattgttatatttctactgaattctcatttttagaaaattaataattttaatatgttatctaatgtctttctgcttatctaagtgtttaattaaccagaaagtcaaattttggagctgtgctgaagcattcatagttgcacatgtgatattatgtcctaaataagtaaaaaattgagtgggagcaagaaatggtatcagaccagggattctggtcatctccctggaagacttactgtgtgctgtggctttgtgactgacgggttgtgtgtatgtatgtgtgtgttgcttaagctacaattcaggagatactaataaaatccattcaaaatgaacttacagctactaaattttagaagtaagagctaaaacccataaatctcaggcacaatggagactaataaaattttgtaatatattttattttactacttcaaaacaccctttactaacatgagctaattaatcctaaaatgactcctacatgaagtttactattatgatctctatttcctgctgggagaatggaagatagagtgattaaatgatatatttaattaggattcaggaattttttatattagtccacaattttaactaataatcagaaaattatttcggtttaaaaaaagttgttgaataacctttttgaccattatttatctcagaatggcctgatcataaaaagaattctagcgttttcttgtcttaataaaaaactgttgtcatggaaatatttcagatccctccatcctccaattggctgaatctgaacagtacataaacaagcagattaactgaggctcagtgaagtcttttacggtggaagtaacgtctggaaccagctgtattacaagcctttccaaagtccatctcccaggacagggaagagagaataaaagaactctgttggaggctcagctgtactctctaacaatggcttcttatcccaactgactaagttctctcactctatctaaatcaaatacactaaatcaattactgcttcttgtgcagaagtcttatctattttgattggcaaataaaaatgaagttgtttactaggaaagctgtggtatgacaatattttccaggcagtttgggcctggggtttgcatttaatttaatcaagtgaatttgtgaactgatagtgccattcatttcagtcaggttgggggacctgaccaatgcatgattttatattcacaacaaaaatattctccttccttccctcaatacaggaactctgcatcaaatcgctttccgtgaatttgtttccatgcagtggtgtggaagagcaattataaaattaattcagagcaggaatgttttatatcctgaatgaagaagaaaggggagattggaggtgctaccttaatgtgtgcctggatccatcattcctgaacatgctgctgttttatttcattctgatgtggtgtttctcccagctcctaagctccttttggcatatatctttttgcagaactggaaaaaatttgaaatgagaaaaaatgagttgtggctgttttttgttttgggttttgttttggtagaaatggggttttagcatatttcccaagctggtctggagctcctgagctcaagggagccgctggcctcagcctcccaaagtgctgggattacaggcatgagccgccacacccagcctaagaaatgggttttgttttgagatttccacaaccacactagaagtggctgacatcctgggagtgagtgtggaaacttcaagactggcttttgagaacctgagtctagggcgtgtatcgggtgcttcttatgttttcgtgctcacttgtgtgggaagacaagatatgagacaaaaagacacacatagctgcaggcacacacgtacatgtgtatacatattgctggtttagaaggccttgagcctttgggatactgaggccagaggatcacttgagcctgggagtttgaaaccagcttgcgcaacatagtgagatcctatctttacaaaaaatcttttaaaaattagctgggcaaagtggtgcacagctgtggtcccagctattcgtgaggctaaggtagggggatctcttgagcctgggagatggaggctgcagtgatctatggtcacgccactgcactacagcctaggcaagatcttgtttttttgtttgtttgtttttgtgtgttttttcttaaaaaaagaagaaagcagcctggagtaacataggaaaaggattatattaattcttcaagagagagacaaggacagtttgtctaaacttggagcacttataacgaatatgataaatcattcatataatttcctttataatgctggagttgaagaactagaacaaattgctcatcttatgaggccaggctggtggtgaatcaagccagtattctgccagcagcatgaagggggtatgtcatgggacgtcataattaccctcatgctaaaacctcaaaaggttaaagggccctgagtgaaatccccaacaccttgtggctcttaatgagtgtttactgtaatgataaatgataaaagctctctctaaatctgttgctcactgacttaactaaacttttcctgatttatttttatgctgaggcttttatctgggactaagtttcataagcttgcagtccatggtgtaaagtataaaatgacttattttaagcttcaaaggatgttctcaaatttgggcattccagaatttaatgaacagacagcctgtccctcatgtgtgtttatgattggataggcttgctttattttaacctgataaacccggagactcatcattttcaagggttagtctcatgtgaaaacacatctatatcaagcttttacacaatgcagttattacattttggggaatgtggttgtatgtgcgttactaagtatatcctaaagtctactgagtatttggaatttatagatacagtcagccttcagaaatatcatctaatttattcacatatccactttgtgaggcaggaaagggtaggcttatgtgagtatcctcattttccttactgaagtgggaaattcatcctggaggaaggatctacatgagagagacattcattgcctccaagtgagtatctttgagtcgtagaagagttatttgccttgaggggccttatattgactgagaaaggggggtggggggatgaggcatgctgacttgaagcaagacaaagacaaaaagctcatttactttcgtgatcttcaggcctgttttgctgccgagagagtacatcagaatactgtttggaagcccccttaataaatgcaaactggatcagaatttcagaatgacatttgcacacatcagttgccaacataatattcacttattgcatgattatttaattggtgactcctatgtacaaggcagaagctttaagccggggcagcagtgggaaacttaatgtccacagtccctgcctcctggagcttacacactggtgttccagggcaaaacaaaaactagtatatatatgcagcttaatctctacacaaagaggttcttctttaacaactgccagttcgcccctgtaatcccagcaatttgggaagccaagccaggaggatcactaaggccagcagtttgagaccagcctgggcaacatagtgagacccctgcctctacaaaatacttatattttttaaattagccaagtatgttggctcatgcctgttgtcccggctactcaggagattgaggtaggaggattgcttgaatccaggagtttgagagcagctttgtcaacatagtgagactctagctctacaaaaaatttaaaaaattagccaggcatggtggtgcacacttgtagtctcaggtgggaggatcgcttgagcccaggaggttgaggctgcagtgaactgagatcatgccactacactcaagcctgggtgacatagtgagatcctgtctcataaaaggacaggaaaaaaaaaaaaaaccctgcccctctgtggtctgatctaaggccaacccattcccttaacaatctcaattgggagatcctgggagaaaagaggaggtggggccagcagggcatgtgtttataccatgtggctaaatgctgcctctcccacgctctctcctcgaactctactcttcatttttctactggcaaacaagaccaaggacatctcaagtaactccttgagtccattagagcaggccagaagagctcagaatccaggattccacgagcacatgatcatggagggtgggtggggatgctatatctgtgtttcctcttttgagaaactaaaggaattgtgataagaggtgaagaactaggacagtgtcaatagagcaagggagaagggtacaaagagaagataaaaatcacaggaatttttgtgggggataaggaaggagaagtatctagaaggattccttgctttccatgcaactataaaataatggaactgattcataaggaaacaggttttgagtacggaaaatgcttgatttattctgactttgtttgcattcacatggaaatgtctagtgaatgtagatatatgagtctggagcttctaagaaaacttgggctggagattacaaattggagatctcatacttcttgcttctccctaccgaacttctgtgataccagccatttatggttttttttctatctcactggccactgcttttcattttctttcatgaatgcatcttctaacaccttcatttacatattcttcaggcaccaaaacccttcaaacccctctatccaaaagtaaaccaaatcatcctccacaccactcccaggctactgctactagccatctactgcttccgtgctccctgtctcaagaatgacataattatctgcttagccagcagatccagaaaactggaaagggtcctcattcttccttctctcttgtctccaactagctctttactcttgagaggctaccactcagattacctttcagatatttcctcctctttctggatcttttatagcaatcttagttcaaagtccttacctgggtcactgcatcagtctattgctttcactgtcttcagcggtgatctttctaaaatgcaaacagaatcttatcacactgacattgccttcttaggtaggtcatttccatgtggtggtaaagatgaccaccagtaacactagacttgcaaactatgtcatcatctttggaacctcagtggaaaaaccaagccatttaaagcgtattccagtaaaaagtccagcgtatgactcttactgacccacttgggtcatgtgcccattcctgaacccatcactgtggctgggggtctggagctctgattggccatccttgggtccagtacctttcttcagggaatggagccagccccatccaaatcaaatggatggagagagaggaagggttgactacctctaaataaagagcaatctggctatagaaggaataatgaatgaagggtgggcccaaatcacagatgtttcaaaaatcttttatttcacttttaagaaaaccatttcctacatgtctaccctaatagagtcacatatggctcctaaattaggcttctcactcagactctgtgtctctgattatactacttgttctgtctggagttcatttgggggataggtgggtgggagagagaggatagtttcagttgaggacatactgaatttgagatgtccaggagtggctgtgtggtcagttagatagatacatacacactgacttggaggtctgggacagagatatatatttcagagtctttggtgaagagatagtggttaaaggcagaagagagaagattctcacaggagatatataaaaggtaggaagagagaagaatctagcaatgaggtcctcagagttcattggacagaggagaagagtctatgatggaaactgaatagaagaagccaaaagggtagaagggaaagcaggcaagtgtggcatcagtgagtgtagggaatacaatagaaagtttccagagaaaagagatctctgtggtggataccattaagaaaacaaatcaaataaatagtaaaaagcatcccctggctgaagtggcatatatatcttcattgaagttaatgaaaaaaatgtcagtggagtatgagaaccagactggaagcctgaggggataaatggtagtgaagaagtgtagacagcaagtgtagacattcgatcatgaagagaagaagcaaaataaggtgattattagaagaggatgtgaagtccaaagagggctttttacaatttatttttttaggttggaagtacatatctttgtttttacttttttaaaacttaatctttgcaaattagggaggcacagccttccgtgtgaaattaaggtgagttcccaggttagaagaacatttgaatgctgatggaaaggatccagtgggcaagagagaggatgcctgggagagaatgcattctaggcttccttggaatgactgatctctaataggaaaaggacaaaaaaggaaagaggaggacacggtgtggatgaggatgctttctgggtgtgtctgtggagatctgtgtgatgatttctgttttctcctggaactaggaagcagagtgagctgttgagagtgcagagaaggggagggagctaaggacgatggaagcccaggtgaagttggtagctgggaactcaaagtgagtggaaactgctgaaatcctttactttcttcagtgagtctcagctacgcagattcaagcttgaataaagcagaaacagcagaggacagaggaaagggctgtttgggagtaatttcaaaagaaagactggaacgtgagactgtgttgtgaaagctggacaagaaaggtggtgaagttaaaaccaaaaggtctcaaaattaggagaaaatggaggggatcgtgcttttggtgaagtcaaagaccatgtaacactggttggggcatgagaagtctgtggtgagtaagctgagtttgagccgggcacagtggctcatgcctgtaatcccagcactttgggaggccgaggcaggcagatcacaaggtgagaagtttgagaccagtctggccaacatagtgaaactccgtttctactaaaaatacaaaaaattagccagatgtggtggtgtgcacctgtaatcccagctactcaggaggctgagacagaagaatcgcatgaatgggggaggcggaggttgcagtgagccaagatcgtgccattgcactccagcctgggcaacagtgtgagactccatctctaaataaataaataaataaataaataaataaataaataaatccctgagtttgaaggtagagcagtttggagtgttgataaggtccagggcatagagagagaaggtcactagatatgaggaggtcaaggacctgagaagccaggagggtgggtgggaatctgggcacctgttcgttataccataggtggattctatgccagaagttgaggtcgatagaacctcatggtgaaccaagtaccagtcttcactcagtatatctgtgttgagggagggggatctgtggatgccagtggcaagaaagaaaaagcgtacatgacatgagtctccaagaagtactttacagtgtcaaacaaactttaatgataaaattaaagaaagtaaatgaattttcaatgtgctgcagttttaatatagggtaattaatgctataaaataacagacaatttctgattaaaaacatttttttagaaagaagtgttctagcctggagtgcagtggctattcacaggctaaatcatagcactctacagcctggaactcctgggctcaagcgacccttctacttcagcctcccaactagctgggactacaggtgcacaccaccacacttggacaagatatctgagtttttaaaaagtatgtgagtatgcatgattatgagaaagttctgctatcaaaaagcataggagttttgccagccacagttgttcacacctgcaatcccaccactttttgaggctgaggcaggtggatcacttgagctcaggagttcgagaccagcctgggcaacattgtgagaccccatctctactaaaacacaaaaaaattagccagacatggtggcatgcacctgtagtcccagctactcaggaggctgaggcaggagaatctcttgaactcaggaggaggaggttccagtgagccaagatggcgccactgtactccagcctgggtgacagagggtgactccgtctcaaaaaacaagcaaacaaaaaataggagttttgtttgttgcatactaattggagttgaggcttcgattagcagatcttggggaccatacagaataagaggccattagctagcagggcttcctggaatgatctatgaaaaggtaacaaggccatttccccaggctcagtttcaaccgtgggagacagaagatgtctctagccatgatccaaagatgtctggttttaggataaagggaaagagaggaggaggtattatatttgtaacaatttataacagtagttggtcttagaagtcttcatgctgaaacaggcagggagaatgtattattatagaagccttcatattggctgggcatgatggctcatacctgtaatcccagtgcttcgggaggccaaggccagaggatcatttgaggccaggagttcaagaccagcttgagcaacatagtgagaccctgtctctctctcttttttttttttaaaaaaagaagaagttttcatactgaaacaggtgggaccctccagaaaaatcagactttcttagccatcacagcctttcggtgcccagaaatttgctttcatttggatgcttttgcccatcttcgaaaattctaagattgagcaggtggcctgggtggacaaggccaatggaagcatctctgcctctcccaaaatgcttctaaggccatttctctccttccaataagcaatactcgctgcttcctggcagatcttcattacagctggccccagggaattccagaggcaaccatgctcggggaagcaaaggctgagctctctgggcatgaaacaacactgaaagctttttgtcctagtacaggcgtgagtcctgatgtttttattgcaccttcacagttcagaattcactttctaaaactcctgctttgtttcctgaggatggacttcagattcccttaaaaatctagtaggtacactggaaaacccaaaagaaattataatgcagcccctaaattaattcaatatattgctatgagtcattggatatgaaggattaagaaacgttgacagcttttccatctgataccctgagataaggaggctcatggtgcctaatatcttacatattttatgtagaaatgtgatgtctggacaaatgcaataatctcttcctattgtctcattctcagaggtctcatcctggactgggcatctgttgcccttgtgtgttcagtgccctcattttatctggagaccttttctttcctcatgctatatggtccctgtggggctgtcagctactcttccctgttctcttctcccccatgcacaggggtgggacagtgacccagtctacaccttccttgtttggtagaatagtttgggaggaagcagttcttcccagcacccccagctttattaaggtgtaattgacaaaaactaggttttgtttatgtttttttttcagggagggggtgtagcttgggatgcaagcagtctccttatttactacatggaaagaaccagactgcagaatgaagccaagcagaaacacacagagctgagagatagagccctgatgatatcagctgtacttctagactcagccatgcttttccacttgtatacaaatggtagcccaggataaacatggttctgcactttgctttttaaaaattattatttaacttgatataccctcaagattactccacatcagtgtagagggagcgtcctcatggagttacacagcgcttcactggctggctataccaataattgattcaactacttctttattggtgggcatttaggattgtttccagtcttttgatatttcaaatgcacatgtcacttcatattttgccagtgcagatagtcttagacgtgggattgctggattaatgaggaaataccagtgtaatttgctagacacagacaaatgtctcctcacaggggttgctttgcattctcaccagtgatatgtcttgtttcccccgtgaatttgccaactaagtatgttgtcaaacctttggctttttttaatctcctgtattttaatcctgttctcttaagttttgcccttcttgaaaaggcagagaagtggctcagctccagccatagtaccaccgtgataagatgggagcactccccaggaatatgttcaagagacatcggtgaacagaatctagagtctatggaggaataatctctgttgggatcaaattttgacatagtcggtgatactgaaagaatagttcatagaactagaagattattattccaaaaggggtaggagtggagggcggacagtgagcatgatgggggttgcattgggggatgagcgctggaaaaattgtaaggaaaaacataggatgtttgtttgccactattagctgaaggagttggttttgttatctcaactgcaaactcataaattgtgaaggcgctactgatcattaaagagaatttccactatgtgaatcccctttctcttttccaatatgcacccccacccacccctgacacacacagcagaaagcaaattcaacattgttggagacatctttggaattgctagttgagtcatttaataactttttctgggtcttcctgcttttaaacaaaccataaatgtagagaaaatcatctagaagcatgctttgaaatttcattagtggagtactaaaagagttctaaaatgagaagacacattggtcactttttaaattacgtagagatttttcagactactaaagacattgttattttaaaaataaataatcactaaacttgtcaacattgtttattaaagccgatgttttagaatgcctaccctagagttgaaggacatcatttattttgctttttggaaaataaaaatgcaaagaaagtagaaaaaaacccaaatcatttcccttatcttgcaaaaattgaactcaaataattgagcatttctgtggcatctagaaaagtatagactaaaatttgccatcacacttcttgtaattggttgaataatggcctccaaagatatccaggtcttcatccttggaacctgtgaatgttattatgtggcaaaagagagtttgtatatgtaattaaagatcttgaggtgagagggtatcctagattatgtgggtggattccaaatataatcacgtgtccttattagagggaggcagaaagagatttgactgtagacagaagaaagaaggtggtatcatgacctcagcagagagagggctctgaagatggtaccagctttaaggtgcagggaggggctgttagccagggaatacaaggaatccagctctagaaggcaaggacactgattctccccctcagagagggccttgtaccttggcctggtgacattaattttgaccttctgggctccggatgtgcaaaagaaaaaaattctgctcttttatgccaccaaatgtgtggtaatatgttacaggggccagccatatcaaccaattaatgcttttcccaatttctaggaaacaggaacttgatgtttgattttaaagttcagtacatgtgttaatggggatgaagtagaatgtaaaggtatgataaaaataataataagaagaacaaaaaaaaacaaattttaggccaggcactgtggctaatacctgtaatcccagcactttgggaggccgaggcgggtggatcacttgatgtcaggagttggaggccagcctggccaacatggtcaaaacccatctctactaaaaatacaacaattagccaggcatggtggtgcatgcctgtagtctcagctacttgggaggctgaggcgggagaatcgcttgaatccaggaggcagaggttgcagtgagccaagatcatgccactgcactccagccggggtgacagagtgagactctgtctaaaaaaaaaacaatcaaccaacaaacaaaaaacaaatttggctgtgcttcttttaggaaaaaagacttaattgcattaaatctcaaatgcatcattagtaaagagcggcaactgagtttcctcggctggcattgtggtggtctagctatactgaagggtctccctgttataagtcaacctaattttttaaatgtgttgctaggcttgcagttcataagggaattcatcctttaaggtcccatatattagtcagctttggctgtgataatgatgtacagcaaaaatctcaaaatctcaatgtctacaacagtaagcatttatttctaatttgcattgcatgttggcagctgttaagctggataaccctgctccaggctccaggtcaggttcaggtctgtttcatggttcttctcattgatacttaaggagcaaagctcatctaggatgtgatgttctcatggtggagggcaggagcacaaaagaggtcccagaatcttgcaaacctcttatgatgtctgttttgaagtggccacactgccatttctgctaagatttcattggccaaagtaggtgcaataacactgggacagggacatttactgggggtgaggaagtaaatatttgccaaatactaatatggtctatcatactcctctattagctaaaaccaaacaatgatgcagtaagcagcaagtaaatgctattaatatatcaatattgcagttgaagggagactaaccctttggctggtggctgaacctgagacttctgcactaaattgagactctcaaatggggctaaagtggccctagagtggtagggtcccctgcttcttagtagaaagaaacacaaatccattttggattcccatagactaagactaaccaaataaaatcgcaaccaaatgaatttccaatcaacacacatggaatgaagttactatgagtaagagtcagcggaaacaatggaagacacaccccaagctttagatatgagaattaacaaaatagaaaataattagttatgaaatgtttaatgaaataaaatttggagacataaaataagaaactcaagaattgagaggctgatttgaaaaagaattaaataaaacttttatttatttataattcattaattaaattttttgagacactcaggctagagggtagtggtgtgatcacagctcagacaacctcaaactcccgggctcaaatgatcctcctgcctcagccttctgagtagctgggactataggcatgcaccaccacacctggctaaaaacctttagatacaattactgagtctaattgttgtattaaaaaaactcaactgatgggccaaacagaagattagactaaactaaatattgatttagcaaagtagactagaggtttgaagaaatcacccagagtgtagcagacagggaaacagaatacgaaaaaggttaagagatacagagaatagaatgagaatgtctaacatataattaattggagccctagaagaacagaatatagacaatggagaaaacagaatatatgaatagattagtagctgagcattttccagaaataagatttaaatgggagatagaaaaaacgcaaagtacattaggcaggatggagaaaaggaaagccacatgtagacaaattacagaaagtttagaacactgaaaacaaaaagcagctaaagataaggcaaatgacttaaaagggacaataattagactaagagcttactgttcatcatcatcaatggaagccagaaatcagagagataacatcttcagagtgctgagaatgaaacaacattatacctgggataagactacccttttatttttttctgaagggttgttctgtccccaagaaccctcccaaaataaactgattataaacctgagacttcagagtaatagggattgggtaaaaccaatcaaggacactaatcacattaagaacatctatttacatccagccatgttccacaacagctttgagtctatttctagtatataatttcaccctctctcatggatgtggatagacatttttggataaacaaaaactgcaagtttattacccatggacctttactaaaggaatttaaaaggatgttcctaggaagaaggaaaatgatcccaaaggaacatctaagaagcaacaaggaatccttagaaaagaaactgcaaaacatattggtaatgctagaagaacttgtataatataataataatatctaatttggtggtttcaaaaaaaagacaggagccaggcatggtggctcacacctgtaatcccaaaattttgggaggctgaggcaggaggatcgcttgaagccaggagtttgagaccagcctggacaacatagcaagaccttgtctctaaaaaatttttcttaaaaataaagaaaaaactaaaaaaaaaaaaaaaaaaaagccagagcaagactggtccttgatcaaaatagttttttaagcttcatgttcagataggggattaagatacgaacttttggtttgttacattaggcattgttaaaaaaaaaatttcaggcatattaaatttaacagattttaattgagcaaagaacagtttgagaatccagcaacattgcgcttccctggaatgagaataggttcagagaccctgatgctgctgtgtggccaaagacggtttatggacagaaaatgggaagtgacttacagaaaacagaagttaggtacagaaatagctgaattggttactgctcagtgtttgccttatttgaacacaatttgaagagttggcctctttgattggccgaaagtcagtgattgatacaagagtaagttacagtctgtttacacatctagttaggttatagctcattatgtatgaagaaacctttaggctgttaaacttaatttaacagcatgcatgtaaaatgtcaagcgtaaccggtaaaagaacagaaatgcagtgattaacatcccaacccatcccaagtgaggaaataaatgcagtaagaaaacaaagaacactatcattactcaatcagacgactaattaaaaggcatgaaaaagtacgtagtaaaaatgtgaaaacaaagccaggtattttagaaatgatgatttttaaaaggtaaatcgctatcagtaataaactaataaactatattttattaattttagagctctagaataaatagcacatagttattcaaaaatgtatttctttaaaagcttagctattgatatgatttggatgtttgttccctccaaatctcttgttgaaatgtgatttgcaatgttggaagtggggcctggtggaaggtgactggatcatgacggcgggtccctcatgaacggcttagcaccatcaccttggtgataagtgagttctagctcagttagttcatgtgagatctggttgtttaaaagtgtgtggcacctcccaacccactcttgctcttgctctcaccatgtgacgtgatggctgcccatcgccttccaccaatgattgtgagcttcctgaggcctccccagaagcaaatgccagcaccatgcttcctgtacagcccacagaaccgtgagcccattaaacctcttttctttataaattacccagcctcaggtgtttcttttctttctttcctttctttcttcctttctttctctttctttcttttttcagggtctggctcttttgcccagactggagtgcagtggtgtgatctcggcacacctcagcctcaacctcccaggctcaagggaccctcctgcctcagctccttgagtagctgagactacaggcgcaagccaccaggcccagcgaattcttgtattttttgtttttagagatgaggtctcactttgttgcccagctggtctcgaactcctggactcaagggatctgtccacttcagcctcccaaagtgttgggattacaggtgtgagccactgtgcttggcctcaggcatttcttcattaatagcattgcaagaatggcctaatgtagctatttttatacaaaaagatgagctatttacaagtcattctttgctacccacctctatatttgtcaaaaatttgaagcataatatagatttcttatatgatcataaacggcttaaatttgttacatttctgtgtgtcaaggaatggtgctgagttccaagatgataccagtttttacaggtttgtggccatcttcgaaatgtctgcttaataggccttctttttaaagaagacaaatcatcactgaaaattgaagagaaaaatcgagtgttatttatatgaaacttaaacatgtgacattatgtattcttcttctttgggtacttcccagatgtgattatgatctacatagttttgctaagacaactcaataatttgtaaagaggcttagcattaaaatgttccctatttgtgattacccattgtactttaaaattgttcctgctaatttttcatttctgatgatccaagtgaagagtatttgccaaacacccacagtatcaaatctaagatgctaaaggcagcctgcaaagggaacaaagggaaacgaattctagaggagactctacaagttaaggttctatgtaattgttgggtagatgcaaaacggactggaggaaacattgcttttgatacacctgctgaatagttccctttaagggttgtcctccctcacccccaaagaaattggattactaggttgggctaggtggctcatgtctgtaatcccagcactttgggaggccgaggcaggtggatcacgaggtcaggagatcgagaccatcctgactaacaaggtgaaaccccgtctctactaaaaatacaaaaaattagccgggcgtggtggcgggcgcctgtagtcccagctgcttgggaggctgaggcaggagaatgccgtgaacccaggaggcggagcttgcagtgagccgagatcacgccactgcactccagcctgggcagcagagcgagactccatctcaaaaaaaaaaaaaaaaaaaaagaaagaaagaaaagaaattggattactaatctgagacttcagagtagatgatgggtaaactgattgatgatgctagtcttctaagtatgtttgtttatattctacctcactccacaaaagatttgagtgtgtttataacatgcaatttcctctaagttgaaaaaaaacgaatgaaaaaacagagtggtggaaaatatataaagaaaaggcatataggctgggctcagtagctcatgcctgtaatcctaacactttgggaggccaaggtgggaggatcacttgaagcctagaattcgagaccagcctgggcaagggagaccccatctctacaaaaaacaaaaaaccttagccggtacaatggtgtgctcctgtagtcccagctacttgggaggctgaggtgggaggatcacttgagtcctggagtttgagggtacagtgtgctgtgatcatgccactgttctccagtctggacaacagagcaagaacttgtctctcggggaaaaggaaaagaaaaagaaaaaaaaaaagaatagtaatataaatctaggccagatgtctctaaacttggcagtggtgcattaggatcacctggggaacttttaaagctcctgatgcccatgtggcaccctgtactaattaaatcataacgcctgggagtgggaggcagagaggagcagtagtaaaaattcccaaatgtttctatgtatagcaaaatttggaaactaagctgatgttctcagccttaaatgcacattagcatcacctgggaggctgttgaaactactgatgtcagaatccattaaatcatagcctctgatgctggttaccgggcacttagtctatttgaaagctccccaggtgattgcaatgtacatgctgagtagagaaccacagcactgggggaaagttggtatatagttacaaaagggattttttttaatgggttcttttatggcttaagaccatgaaactggttctgagcttcctggtggccaaagtagatagaaaaacacagtcggttttaataattttggtcatctgccatgcaaaagcttaccagtttcttgaaagcaaaagagcttttcttcatagatctgaaataaatgtctagtttattagtcttctcacagaggatgttgatgtcatggatcacgattttataaacaccccacaataagtgacatatggcaagtttcatattatagttcctaataaccatccctcagggaaagacaaggacatgaccctgagtgcagggctataggctgttgcggtgggtgtgtgggagtagatgataaaagacaggaagagaaactgccacacccctctacagtttccagataacatagccttacccaaaggcgaagcctggaattgtgtacctccaggatgtggaaggcgtgtcctgtgtaattagaaattataattttctatcagcacattttaagaattatttatttatgtatttatttatttagagacacagggtctttctctgtcatccaggctggagtgcaatggcacgatcatagctcactgtaaccttgaacttctgggctcaagtgaacctctagtcttagcctcctgagtagctaggactatgggcccatgccaccacacctggcaaatttttaatttttttttttttttgtagggacaggggtctctctatattgcccaggctggtctcgaactcctggcctcaaatgatcctcctgcctctgcctcccaaaatgctagcattattattcaattacttttcttcctttataatataaactgtacaaattttacaaaggtttggctagtgagggtaggtagagaagcactgactcccatccatgagggtcacaggctagggcaagggcatctgagaatgcgtgtgtgtgtgtgtgtgtgtgtgtgagagagagagagagaaagacagagtgtgcacgtgtaccttttgtttatcaaaagactttagggttgtttttttttgtttttgttttttttgagacggagtctcgctctgtggtccaggctggagtgcagtggcgcagtctcggctcactgcaacctccgcctcccaggttcaagggatcctcatgcctcagcctccccgagtagctgggattacaggcgcccgccaccacgcctgggtaatttttgtatttttagtagagatggagtttcaccacattggccagctggtcttgaactaccgatcttatgatccgcccgcctcagcctcccaaagtgctgggattacaggtttgagccaccgtgcccggtctaaagactcgaggtttgaaagggttgaaaaacctcagtattgaaagaatggacagaaatctgacttttaaatagtcctccataaatagttctcattgggggttttgtggcctgtaagtactgtggacttgacggctcaagacttctagagaaggcttctgagtaggatgttgactccatggggctaagtcgtcaaaggaaacccattctacggcacaggttttaagccagtcatgctgcaggaaggcaaaggagagcttaaggtagcatgggtgggctcttttgaaaacgaactagcagggcgaacagcagatatttagttatgtagctggcaacgaggaatatgattccttcgggtcacgcgagttctctctgaacttccttgaatgaaaatcctaaatgcatcctggtaatacccaagtaggcactttgacgtttccttttcaaaggcaaatggaatgttctgcgtctgttttctttttgaactcccaactgcacttaacatctaaatttaaggaaaggcttccgaaaaagtcgactgacgaatttctttcacttatttaaagtagtctcttgcagtcctataaatcggaaggattaaatgaactgcttgctagagaaacggtagctgggtggtgggaagaatcctacggtggctaataagacgtctcgatcatttgcatatgcaaaggataaccttaagcttgagtttgatatttcacgttgcggctcacaaatgaactgctttttattcaaagaaccatgctgtctgttttcgcgtgggtgggtgtgtaaccggggcgggcgctatgttggttttgttccctgcaaggttgacacaggcaatggcgacttgcggccacactggggcagcctctcctcggctggcagccgggccgggcggctcgctcccgggagctgacaatgtagccaagtcctgctcgtcggggccgcaaagaatttaaaggggtctagaaacatccatcttttccccttttcacagttaacagcgagctcagggctctcggtaaaaagaccaccgggaggaagaaacgctcagggcgtttttgttattgttcgcaaaatcctctatcgcccccaaacgtccagcccgccccctccctaaagcggagggaaaccgggagaggagggagggtcggcggcgccggccaagcgcgccagtacacgcccctgcggatccgccccgcggccgggtgacccccgccgcgccgcgctggaggccccgggccggggtgggcgtggggctgaactccgccacccccgcagcccgcggcccgctcgccagcccggcctgtgattggcttggggggcgcgtgtgcccgccccggcgaacggggagggtaccctcgcggcgccggtgggaggaggcggaggagggggcggagagagcgggggcccggacggcgctagcgaggaggcgggcgagccgggtccccgggagcgcagaggaggctcggaggggggcggagagcggcggggcgggagggaggcgcgggtcgcggggagggaaagcccggccgggtctgcgccgccgccgcgcgcagtgagaggcgccggggctgccgcccggtgctcggcgcgctctcgggagccgcccgcccgctggtcccgcagccttccgggaggaagcggtgccggcagcgtccagggcgcgctctcgggcaccctcacctgccggcgcccggccgcttacccggcagggcgtgcgcagggtagggtgcgggaccggggggacctggaggcagaggggagaaccggccgtccgcgccgcagcacagccgctgggagcgcctcagaccccgcgcggggcgccggctccatggcgaccgggctcggggagccggtctatggactttccgaagacgaggtgagtggcacccccttcctgctcgggactccccggggagttcctatcccgcgccggcagggggaggggaaaggggccgtccccggggtgctcgtgcccagcgtctgcaggggagccccaaagcgggagcgccccggagcgggatccaggggagcttgggtccttccgcaccccccaccctccgcaagccgagctcattgtttgtaaataaagcggcgcgacgcccttggagctgggggttcactccgcagctcctcgctttcgggaggagagggagggggcatgcgtgcctctcttccctcttcctctccaagcagcgtctcccggggctgttgggcaactttccgcctctcgcccctgcagcccgggagtccatgatgcatgtcacgtctgggtcgcgcggctggagacccgggactgcggagaagccggatcgtttccccctggaactttctctctcatgattgtgtggatcagcaggcgctcagaagcctgtgcgtgcttatcccggcgggaatgggggacacgctgcgtgtgtccctcccctcgttttgcaaagtctacggccaggattgtggatttcggagcctcggtgggggaggtgttcaaggctggtggcaggtgctcctggaaacttggggaggaagcttgcagccctgccattttttcctcccgaggattcaaagcccggcacctccagggtgggtggggagaggaaagcttaattgatctcttttattaataaagcgactgaataagccacgcctcccaggcggtcggtttcactggaaagggctttgtttttaccttcattctctcttccgtgtctcccactccccccttttgaaacaatcctgctaaatcactgcctagtcctctctcgaccagccacgctcggctcttattggtatgttgctctgccaaaaaggggggtgggacgcttgtcgcgggcgcggcgtgacaggcaggctggatggagcaggtaggagtggtttgccatctggcggggtgcgcgctcaggtctggctcccctttcgagaggtgaattttacaacccaagaagcattactcagcagggaggtatttcctatcctggttgtgcatttcatgaaaagttgatgcctggaaattcaggcgttctcgatttctctttcttcccctccctcctttcttttcagaggttccctctttctctcgtgttgggggtggggttggaagaaaggctattatctgagacaggctcgcgttatggctccgctttctgcggctctcctaccctggcatggtgtgtgtgtgtgcctgtgtgctacgtaagtgtggaatgaaaggtattttggggtgggaagggtgtttagggtatgaatttttttcttagcggtgctaggcaaagcttgatgtatttatttgatcaaagaatgatcacagtgcaaataatgtgtgatttgtgtgtttattttgcctcgctgtgcttttgtaaaataatttcccgttttgtgtaactacctggggataggtgacagtagcattgtttcattgacccggggggcttctcctctccctcctggcttctctctttgaggagctttcccttgcatcctctacttctccatttaattagtggcagtagagggcaggccctgagttgcagagacgcagacattcctaaacaaaggggctgcttgggttgacgtattgtggggggtgggggtgaggacagctgcatttcatcctaggttcttttaaaaaatgttttaataacatgattatttgtaaaaactcccccgaaaaaacgattttaagagtgttttgggaagtgcagctggataaatgaaacacgttaatgtcactgttgtttgtgctttatttacattggcagtgagtgtcagaatctacctagagcacatcttgccacttttgtccacaggagtcactactaatcatcataactgatgtctagtgtgaaagtgaagcttggaatgtaaacagagtccgagtgtgtgttggcatgtgactggattcactcctgcatgttgctagaagggaatttggggctgtataggaaatagcaagaggtgatgaagacaccttttattatctatttattgccatgtcgctggtagtatttagttccacacacattgtatttcacaagatgagtctcagccgtcttcctttttcaactttctcctaccagtgaaaaaataagccagggcagttctgatgacttcacatttcattggtatttgtttttcatgggcagtttcatgctgtcacgttgcccttcagagaatcagggaatgccttcgtagaatattaacgacaaattgttgaatttgcacagcttgttttgtctccctgaattagtatgtgtaagaaaaaccaatggaagattttagcaggctctgaaagtagaatgcccgctgaagcaaacggcagggttgttcttccaaggcgtattaaatatgggtacacttagtttgcagacttggtgtgctgcagaatatcacatatgaagatattttgaccgctatttagaagagtgacctcataaatcttttagcaaagtagacacacatacctaccacatttcttaaaagtagattcgtattttgatttgagattgttgaaaagcatggtatgtttggagtgcacttagttatgtcccatctcataaagactgttgagctctctgcactgctgatgatgaagcattgcatgaacccagaaaacggggatgccaaagcacagggcttaggtgctgttccttgcgtcatcagcagaggtctgtccactttgtagaaggtaaggggttgagatgtgggctttgcttgtgtgaatgtatgtgctgtttaattttttctgtgtgtttcgggcggaggtttctctggtgagttataattcatatttaccctgatttaagtcatgtcactttaggtagccagattcaaaaccatcagatgaaggacttttggtgttagagggattagcagtttaacaaaacttctgattcatggcccaagatcagatttggtttggaatcagaacactttggactagtttctgcatctggcttgagtccttgtggatttcttgttttatttctttatttttggcaatctgtagtgcattttggcatagtttacttatgaatgttaccgctaactttctgaaatcttttattccattttagaaaggtatcatttattgaaaagatttttctactgaacaaaatactgggattgaatggcagcttcttatcacattagatatgacattaagtaatttcgttagtagttaaaatgaagcaaatggcatagaaatgaaggccaggctgacataggataaatggcaccttctctccttatcctgtacaaacacggatagttggctacttttgaatgcctcttctataccaatggtaaaaatccggcttaattggggccacattctagcctagtcacaatcagtggcttgcattatgtcctttgagatgtggcagatctgcttataggtgccagtcaccacggctccctgctggcttgggggtctttctactcatttacatataattatctacttcttaatcaaccattaaggttaacttttggcatggatcctgtatgcttttcagtttaagatgctgtcacttttaagatgcgccatgagagcaaagtgctaagccttgtgcacatactatgtcatttagttctcatgagaactgtgtgaggtaggctgtgatttacagatgaggaatgaaagctcaaagaggttacgtgacctgcataaggacacaaaacaagttaagttatggagccagctattttgaatagaaaggcctagtttttaacatgctgaatatcctccccttctgacaaatgccttgaaaggtcttactatctagattatttaagataatgtaagagaaataaacaccactggttgcaaactgatggctgctgggcccgatttgaccaggaaccctgcttaatgtggtctctagagtgttttaaagcttggaaatttcatgaaaatggtaaaaatctggcttaattggggccacattctaacctagttacagtcagtggctggcattatgtcctttgagatgtggcagctagttgtgctatggttgcagtcaccactactttctgttgtcttaggggtctttctacttgtttacatataattatccacttcataacaaacctttaaggctaacctttggcgtggatgccatatttctttcactttagtgtgctgtcacttttaagatatgccattatttcatgtaccacgaagaaaaaattgctgtcaagttatgacatactgtccatcttatgaagcatccttatttcagagaagttgaaatatgagaaaaaggatattttagaattgatgaattacagtgactagaaacctgggaaaactccatgccatcagtttcaatatccccaatcattcagtacttttaagtcaacgagtagtcagatttctgcttttctgtgtttgaggaaagtgctagaaaaagagaagtgctcttaaataggcattagcacagaaggaactgggggcctagatcatagccaactggatggccgtctgtaagtgattaagaatagttgttagtttttaaaaagtggcctgtgtgtattttcaagagattacttgggaaaccctatgtgccatctttgcagctgtgcaaaacggtgaggacaagattgctttcaaaaattgtggtttagattttgcttggatctcaaggtgaatgctgacaggccgttttctgaagagagagaaggcttgcccagtcatgccaagtccaagtgcctgtgtcgggcctagatgctggatggtagactgtatacccaggacatataggtaatgtttgagaaacaaatgttaaaaggacctagttttcatggtgacatttaaaatcagtttttaaaattcatgaatataacatgttgttttaaaatttgattatagggaccgggtgcagtgatcactcctgtaatcctagcattttgggaggccgaggcaggagaatcacttgagttcaggagtttgaggccaggctgggcaacgtggtgaaaccccgtctctacaaaaaatagaaaagttagccaaacatggcggcacgtgcctgtagtcccagctacttgggaggctgaggtggaaggatcacttaaacctggaggcagaggttgcagtgagccaagatcatgccactgcactctagcctgggcgacagagtgagaccctgtctccaaaaaaaaaaaaaaaaaaaaaaagactaatgaatagaatttattttcttcaatgatgtagtgtctgtggaatttgtagacattgacatttgaattttcattatatttagttttattaaatcagaatgttatgattgtttatttcattattgaacatcagtttccttaatttaaggaataaaaataattttgctcaggccagacatagtggctcacatctgtaatcccagcacgttggaggccaaggctggtggatcacttgaggtcaggagtttgagaccagcccagccaacatggtgaaaccctgtctctacaaaataaataaataaataaatgaaaaaaaaatcagctgggtgtggtggtggacacctgtaatcccagctactctggaggctgaggcaggagaatagcttgaaccctgaaggcagagattgcagtgagccgagatcgcaccactgcactccagactgggtgacagagtgagactctgtcacaataataacaggctggggcagtggctcatgcccgtaatcccagcactttgggaggccgaggctggaggatcacctgaggtcaggagtttgagaccagcctggccaacatggtgaaactccgtctttactaaaaatacaaaaattagctgggcttggtggcaggcaactgtaatcccagttactcgggaggctgaggcaggagaattgcttgaacctgggaggcagaggttgcagtgagacaagttcgggccattgtgctccagcctgggcaacaagagcaaaactaaaaataaaaaataaaaaaagaatagtaatagttttgcttaaagggtgaggacagtgacaaatggtgatcctcagatgactgtagtttctttaccattacagaatgcaattcaaatgaaaaccattgcatggtactcaggcatttcttcaatgcagtgtgtgcccacatcaccaggaagcttacttgggaaagtttgttttgggattctggagtacctcaatatatctggtatattttcccaagaaaagtgaataatcttggggggccgaggtggacagattgcttgagcccaggagtttgacaccagcctgggcaatgtggtgaaaccccacctctacaaaaaatacaaaaacttagttgcgtgttgtggcacgcacctgtggtcctggctgctggggaggctgaggtgggaggatggcttgagcctgggaggttgaggctgcagtgagccatgatcatgccactgcactccagcctgggtgacagagcaagacactgtctcagaaaacaaaggcaaacaaacaaagatcaccccaaagaagaactcccaacatattaaaagtcattgagttttgtacccttcaaatggatgaattgtgttgtgtatgaattacatctgaataaaactgtttaaaaatattaagaatgattgagtgtgacattattgcagcagtacattggagtttctgctaaattacttttgcattcatttcaaaaggaagcaactatgcccattgctaatttaataacctgtttgcttgtgcggtgtttaaaatggcatcatgaaaacatggcaatgtgtgatagattaagagccaattaaattttttattttgagttacaagatctgcattaaacagattttattgttgcccttgaatttccagtcttagatgagtagcagcagtgaaaaaaagagatcctaacttaagagttttcaagctttttgatgttgcaggtatttgaataagtgggtctgtcttactgaaatatttgttaattagcgataaagcaaactatatgttgatcttttggtagtccatgctaaggaggattagaataatatataaataatataatggtaataagtatcagggcaggaggattaaagaagggtggaagaagtgtgacaaaatgttactttctgtttttacattgtttctcttccaggtcacaactgtatttcaaatgtatttcattttcagactataggtggcaatgtttgtgctgttcactgtttaatgttactgttggctcgggtgttgcttgttgctggaatatggaaatgatagcataatttagagttgagaataaaaaaaactagatttagaaaactagaaactagatttagatttagtagagactttctaaatagtcctagttctgctgtgtggacccttctgtaactttctgttactctgagaaggagctgataattatcacaactactggtgtttgattagcagagacattcttgattcctgatgcaagaccgtggctgaagttgtagcagggcgtttggtggttggcgatgtaaagatctgggcctcttgtttcatgaataatagaatctcactatgattgtaatattttgttttgaactggagtgctgattattgtaatccctttaggtgagaaaagccttattatataagtgtatctggggtaactagcttaaatttgacactccagtcaactttttgtccctgacttcagtcctgcattgattcaaaacgcaccaagttaaatgtcaaggctctcagattcccttgctgtcatcaaattcagtgtttggtgacttcttggcaggcagacatctaccaagagattttgtattctttttatacctcctattcaccaaaagaaaagggccattcaaaagtgagtttttctttttttttttttttaagtttaaaaagctatgatgtggccacccatggtggctcatgcctataatcctagcactttgggaggccagggcaggcagatcacttcaggccaggagttcaagaccagcctgaccaacatggcaaaaccccgtttctactaaaaatacaaaaattagctgggcgtcgtggcgtgcccctgtaatcccagctacttgggaggctgaagcaggagaatcgcttgaacctgggagatggaggttgtggtgagctgagattgcaactctgcactccaccctgggtgacagagtgagactttgtctcaaaaaaaagctgtgatgtgaaacctgttctgtgaaggtggaacttggaaaggcttgtaaggatggtggtcccatgaagaggatgaacaaaccaagggaactgtcctcttgctggtttgggtgatgtcccatcacctgtcactttgtttgtttgggctgcagtggaccaatggtttcccaggcacactgaagtgacatgtagatggattgcttgagtggctccggcatgtttccatctcctgtctaccaggcagagaccgtgttccctgttttgaggggatccagaagtgcagtgacaagggcctgatttgcatctccagctcctggtcttgcctgtgttaacaattttttttttttctttccagatggagtctcactctgtcgcccaggctggagtgcagtggtgcaatctcggctcactgcaagctctgcctcccgggttcacgccattcgcctgcctcagcctcccaagtagctgggactacaggtgcccaccaccacgcccggctaatttttttgtatttttagtagagacggggtttcaccatgttaggcaggatggtctcgaactcctgaccttgtgatccacctgcctcggcctcccaaagtgctgggattacaggcatgagccaccgtgcccggccaacaatttttacattctaattaatttccagtttccaacctgactcaaggtttagctcttcgtctcttgggtgcagttttggatcatgtcttataatgtatatttaaaagtgtgttgtaaagctggaattcccattgtgggtaaatgctgagattgttgtaatactgagaagtgcacttgggaaccatggccaacactgccctagctgaccggaggttgcactgagttgtcccctttgaacatctgttatgaatgaatgttggaaaatgcaaagccaatcatttcttttacctgacctatgtgatgttaagttttagttttatgttttggcaagtgagtgttggatgtcactaatgtgaggaggccggtgagggcagactttgggtcagaggtaatgtaggagatgaagaccctttctattaatttttcttgtttaattgaagatgttcgtgttgaatgggttttatttacatgtataagttctttttttcttaatgctggaagttactttggtttttcagaaaatgcaagtaaccctaatctatttagagaattactttgcttagtaagcactcagtactatttagtaatggggaaaaaatgtgtttgtgtcccacagcgtgacaggctccacaaacttacttacgaatctcctaactaccctgagaacctgaagaatgggactttgtggagaatcttctgctttctttgctagtctctatttttccttctcagttattaagtgagttgtctttgggtgtcctcatcatgctgacttcatcttgcccagtttgttttgggtagaggaaggagtgcaaggtttaaaggaaaagcaaagcctgtacaacatggtgagaccccatgcctgtggtcccagctacttgagaggcccaggtggaaagataatttgagcaccggggttcaggaatgcgctgagtaatgattgcaccaccgcactcgagtctgggcaacagaatgagacctcatttcaaaagaaaaagaaaaagcaagactgaatcatttcactttgtattctcctccttgctctcattccttttgtgcttcatgcattgtgtgtgacaattggatgcagccgtaattattgtcagtaacttggtttttaagcttcagactgtatttcctcctcacttgttaacaccagaagataaatgaatgtggctcttggattgaactacatctacagggagctgaacttcccatgttgacgttgaattctagagtatgcttatgctgattcttgagaaattggtatgtgccgtgcctttggaattgataccttaattttcagtgaatattattggtattattattaaagagaacactttaagccaggagtaagagcttttcctccttttgagaagtgaggtacagaagagtatactgcagctgtgggagtgatgggtggggtggggcagtgttgaagaatatttaataccacgaagatgtcaccagtataatattaaatagaaaaagtaggttataagacagtggatccagtagaatcctattgtggttaagtgtttatatgtagagaaaatgactaggggctaggcacagtggctcacgcctgtaatctgaaccactttgggagatagaggtgggaggatcacttgaacccaggagttcaagaccagcctgggcaacatagtgagactctgtctctataaaacaagaaaaaagaaaaactaactagggatatattccagcatgttagtggaggttatctttgagcaaaggggattataggtaattttttattgtcttgtgttttgcttacatgtgttttctatatttctacaataaacctttttttcttaatataaaagtaagtttaaaagtgagtttaaaaatccctgaaaggcatgtacttcaagcttcaagtgaaagttatagtacttgttcagcacaaatactgatatagtgtttgttcagtggaacacttatttagggtctgccttgtgttttgtgtctaaggattaccaggtcattttcatattaggagctcaccactacgttgggagttggagagatagagcaaggactattttaaggaaaaaatgactggtaaattgtatttctttttccccacttgcagtttgcaaaatagatgtttcatttctctccactgtggacacttaaagtttgaatttccatccttctgtgcactccagttgcgtgaaagtaatttacattgctagtagtggtttgggttctctgaaattttttgtgtgtgctatggaaattgtctcctgtgatcagactcaaatccatttctccttattattgttttcttaggttttgagttagagaccttttcatgaccgtataaggtgttgaataggtttagatatcaaagtgatagctatgcatagctatactcacctgtgagcggtcagctcttcagtgtttctttcaactgacttgtaatatccagccactgttgggtgtgacctaaagtgtatctcttcccaaacagaagggaggagttgacaaacaccatgttacttttaatcagagacttgtccttgtcccccttcccccagccttttaataattctgaattcatgttgcagtcgatatgtgtttaaagtgttggtaggtttcttgtactcacaccatcctcctccactcctctcacccccaaaaagtgacagctgacagttgatggcatcttagaattgtgaggcttgagttggtctgtctcaattcgtgttttatggtggcccataaattgtgaaagataattgatagttgtcatgggaactagttatgttgttcagctatgatgtctcaattaggaaatgttcacctagacagtagggaaatgggccagctcagggatgtcttcaggaaccaggttcattgttttttctgctttcccttctacagcctggctctttccagggcttcttggtcctaggctggctgccactgacagagctatgcctttttttatttttttactttttttcaagacagtctcactctgtagcccaagcaagagtgcagtgacaccatcttggttcactgcaacctccacctcctgggtttaagcgattctcctgccccatcctcccgagtagctgggactacaggcatgtaccaccacacccagctaatttttgtatttttaatggagatggggtttcaccatgttggccaggctggtcttgagctcctgacctcaagtgatccacctgcctcggcctaccaaagtgctgggattacaggtgtgagccaccatgcccagccagagctatgccctcttttttttttttttttgtttgtttgtttataactgtgtacttgtaaaggaaagagaacggcctcctgtgccttaaatcttctgttgtgtctcagggcccacagaggctgagatctgttcatcctgcaaccagtcaccgtggcaaggaggagatagaattacctttttttcttaccttttgagccaggggtaaagtcaggcacggtgaccctgcattccacaccttggataatccatccaccttcagaaatgcccctggcttcgtgaaatgcacatgctccctttctccagggaggtgacccgaatatgcagctaagtattgcaaggatttctgggtaatattacacctgaaaggaggttttttttttttttaattatctggtgatttatgactaaataggctatgtctctcaaaacattgaacctgcaatgggcaagaaagaacaggatgactacaatgaaccttctatttggaaaaggggaaaataagacactcacagtggggtagctggctgaacaggaacagctgggagcgtttgctttggtcagccggtctggcagcttgcctctgctgaagtccgtccagggtgagaatctcgcttggtcattgtcctctgcagctgcacctggatggggtaggcactggcaaagctccttttcttgggtgctgcttggcattagtctggggcttcaggattggttgtcttggggttgaatagccacaggcttgttccagccttactgagaatgtctttggcaaaactgctcccaggaaaactcaggctctgagttttgtgtctagtcaattccatgggctggtaatggcagccagtgatctcacctagatgaggtctgtggttctgggaattcctgggtcttaacagtaagtcccacagccctgctaatccccaccacatctgccttgaggcaattttaaaatagcctagaatgaagaggcacacagttttgggtctaacagacaacaggggcagtttaacccactctgcttttgctctctggtgtatcaagaatgagcaacttccccacactgggattgtgggactctgagtacccacttcccttcactcagccattccaatttcttaaagcaatttttaaaaaatggtggtaaggccggccgcggtggctcacgcctgtaatcccagcactttgggaggctgaggcaggtggatcacgaggtcaggaggtagagaccatcctggccaatatggtgaaaccccgtctctactaaaaatacaaaaattagctgggtgtggtggcacgcacctgtaatcccagcctctcgggaggctgaggcaggagaatcgcttgaacctgagaggcggagattgcagtgagccaagatggtgccactgcactctagcctggcgacagagcgagactccatctcaaaaaggtggtaaaatacacatgacaaaatggactctcttagccacattaaagtgtatggtttggtggcattacatgcatgcacactgttggcagccatcacccctgtctagccatggaactctttcatcttgcaaaactggaaatgccttactcgtgaaccagtacctccccattcccagccattccagtttcttgtagcgcatcttctctttgatacaaaatctttgatagggttttgattgcaggcaacagcaattgaatctgatgaattcaacagagaaagaattaactgaaggaatttggggtagcactggagtacttgtcacactggagagacaggcctggacaggggtcagggaccaatgaagcctgggcatccagaatcacagctgttagtgtgttttattatttaagagtgagctcagaggtcactgttcaaagctgggcactctgtctccaactatccctcttcacatcccagactcaatagcacctttctgcatagttacttctactgaatacttcactgacagcaatgaaggattgttggtttatgtgtctgtctcgtatagattaggcacctcttcagagccacagccacatcccaatgatttatctccagtcccaagcaccgaatcagaccccttgaccgtttactccattcaagtgatgatctcaggttagataatcatgaggtcagttggtcaaagcaaaaacatctttttaaatgtctttttgaattctaatttgtttatgcaatatagattactcctcctattttcttcttctttcttttttttccttaagagatgggatctcagtatgttggccaggctggcctctaactcctgggctcagcggtttctcccaccttggtttcctaaagttcagggatgacacgtgtgagccaccgtgctcagcccctcctcctattttctagtctgtgtcattactgagaattttactctttattctctttcctcaaattctaagtgaaaagacctctcctctctaggccccaagaaaggcaaatgtgttccacggaagaaggttgcagacccatgtttgattgctttataccatatttcccccccagaggctcttaaaagggcaaagaaggtgttgaaactgccactgtcaataccagagcatctgcttgaaaccaatgtttcttttgtgactccaggatccatgctgcctggctaagaagggcagtgtcctccttgcccaggtgttaaaccacaacagacctagaaaactgagatgtcactcctcccctggagtgacagcagtgttaggaagtttggaatctgccaacccacctcatcctgtccatgaagttgtcacttggctaggtgttgatgtaaatgtgctacagaaacaaactcacctcttgtgggacatggtgactctggttagtaacaatgtattcttcaaaattgccaagacagtagattttaaatgttcttcgtatgcaaacttggtaagtatgtggggtaatgcataggttaactagcttgaattaaccattccgcagtgtgtatgtatttcgaaataacatgtacatgacaaacagatacaattttcatcaattaaaataaacatttagaaaaataacataaatcctcacaatagccctttgaggtaggtgctgtcattttataggtggggaaactgaggttcaaggaggttaaataacttgcccagggtcacagaactacttagtaagtggctgagccaggacttgaacaagcagtccggttgtagacacccggagtggaaccatcacgctgtggtgtgtccgggagtgcttcaagcaggggttggttgggggtggggttggggtggggaaggcacagctgaggcctgagtggccagactgtaaaagccaaaggaagaagtggctggatgtgaacagctttgtggacctcatcaaggagctgggactatattgtttgaggcaccttgagaaacctgttgagatctgggcttttcttattagtaagtatgttgcccagactggtctcgaacccctggcctcaggtaatcctcccatctcagccttctgagtcgctgggattacaggtgcaagtcgttgggcccggcaatctgggcttttctaaagctcaccatgcagctttggggagattggatttgagttggacaaccctaggcagttgcagagctgtccaggcagaaatggtgatgacggtgaaaatgagccaggggataaggcaggaggtatttaggaggcagattccattggatttggtcactgattgattaggtacaaaaaaagggaggtgtctagaataatccctaggtttcttcagaggactaggtagatgggaggaggggaagaagcctatctctattaaatacttagtacagtggctctaaactggggcctgtcttgcacccttccttctcccctaggggacatttggcaatgcctggagacttttttttgagacggagttttgctcttgttgcgcaggctggagtgcaatggcgtgatctcagctcactacaacctccgcctcctgggttcaagcgattctcctgcctcagcctcacgagtagctggggttacaggtgcctgccaccacacccagctaattgttgtattttttagtagaaatggggtttcaccatgttggtcaggctggtctcaaactcctgacctcaagtgatgtaccggtctcggcctcccaaagtgctgggattacaggcgtgagccactgtgcccggccgcctggagacatttttgattgtcacagcttaggagatgcctctgacatctagaaggtggaggccagagatgcagcagaacatcttacacggcacagtacagctcccacaacgatcatctcgccccaaatgctgccgaggttgagaaaccctgctgtagtgtagtatcagttttacgtggttatctaattggatccgtgagccagtcatgttagatcataaatatgatttttcctgtttttcagataaaaaactgaggcatagacaggatgggtcacttggccaaagctctgcagctagtaagtgttagagccagaatttgaacgcaagtcttccagatgtcagaatctactccttctgcttaccctgctgcttcatatctcacagtgatgccaaggaagatgcacattggactgtgggttgttttttttttttttctttctgtcatggtggctccagactagaggaggcaggaaggaaggtggttatttatagtcagctgtgcataggatcgatttttttcaatcctgaaggacttgcagcaggtagttcaaagaaacctcctttagacgttgactttcccttgcagttgtaaatatgggaacatttaccatcttttgctttaaaatatactgttataattaaggtaaaatgtaaaacttataacttaaaaactttactccctgtgcatatgaactatggcaagcttctcaaattaattactatccctttgggataaattaaaatattttgatttgctagaggtaaggagcccttttgagaattagtttgttttagttgagaatgattagagggctagaatgatatatagctctaaataggaaggtttctgattcttttggctactctccacttttactggttattttccagttctgggaagattctgcatgtatgtagcagcctcccttggctatccatggtattagagctctagggacagagttctcctagttgaactcttcataatatctcattattggtattttcaaagttatatgtgtattttaagatagtctttggatgatgttccaaagaaggctgctttgttgagattgagatagttgttttgcagttgtgatttctctttgtaaaaagaagtctttgtgtcggtcccaggtcttattttttgcttgatcacccagtacgtgggtgcacttgggctgttgggaccatctggtgagtgtgaggtctctgtacttcacctgtggagtctgttgtcctgaaaggtgccggctcaggtggtggtgctttgaggggagcttgtttgctgcaccttccagtctgctagaaaatagatgcttagaggggcatttcggggtggaatctgatcatggagtttggtgagcaaacagggcctcaagttttatgttgtgagaaataaatactgagtttatgttttaattatggcacagattaatacaaaatctggtgaaaaatggagaaaaggagagcttaaaacttagctgtttgttgctgtcatctaaatgtagttggtagccagcctagatgggaccacagcatggcactaaagcgcggctgctgcttttcagatcccatgttcatattcgcatgtgtggagcatgaaagtaccaatagaaaattttgacaaagaaattgaagggttgggccagggacggtggctcacgcctataatcccagcactttgagaggctgaggcaggcagatcacgaggtcaggaaattgagaccatcttggctaacacggtgaaaccccgtctctgctaaaaatataaaaaattagccgggccttgtgacaggcgcctgtagtcccagctactcgggagtctgaggcaggaaaatggcatgaacccgggaggcagagcttgcagttagccgagattgtgccactgcactccagcctgggcgacagagcgaaactccatctcaaaaaaaaaaaaaaaaagaaatcgaagggtcgataatttcatttatttgttcttttttttttttttttttttttttgagacagtatctcactctgttgcccaggctggagtgcagtggcgttatcacggttcactgtagccttgacctccgaagtccacacgatcctcctaccacagcctcccaagcagctgggactacaggcactcgccaccatgcctggctaattttttatttttatttttattttttgtagagacaagttcgtgctgtgttgcccaggctggtctcgaactcctgggctcaggcagtcatcctgcctcagcttcccaaattgctggatttattgtcatgagccaccacacctggccagggtcagtaagttaaaagataccttctaaactcagcccaatattgaagagtaaacataaaaatacatgttttgtctattatactattactgttactcaatgcttaactaattgtgcttatgtttttttctttgccaaaatttctcttcaaggagcaagtttttctaatattgcttttcttgggaagaacaattagtcacgagatagtacagcttttttttttttttgagacagattctcactctgtcatccaggctggagtgcagtggtgcgatctcggctcactgtaacctccacctgccgggttcaagtgattctcctgcctcagcctcccgagtagctgggactacaggcactcgccaccatgcccggctaatttttgtattttttgtagagacggggtttcaccatattgtctcgaactcctgaccttgtgatccacccgcctcggcctcccaaagtgctgggattacaggcgtgagccactgtgcccagccgtagtgcagtatttttaagcttcggtaaggtagaacccctttagagaaaaaacatcagtgagaagccatgttgccttatttttactataatgtttctttttttttttttttttttttttttttttttttgagacggagtcttgttctgttgcccaggctggagtgcagtggcgtgatctcggctcactgcaagctccgccttccgggttcatgccattctcctgcctcagcctctcaagtagctgggactacaggcacccgccaccacgcccggctaactttttatatttttagtagagacggggtttcaccgtgttagccaggatggtcttgatctcctgacttcgtgatctgcccgtctcggcttcccaaagtgctgggattacaggcgtgagccaccgcgcctgacccaatgtttcttaaaatacatccaaacataaaaagaacaaggatgtttatagctggtatatcaccatagccatcactataacaccgtaacaaacatgcaaatttgttacaaatctaattctcaaatgaataccattcaaattaatagcatgattttaatgtgacaggtgatgctattttattaaaactctatcatctgtgctcaggaagtcatggctgctagggtaagttttcctttcctaaccaattatgtgccagttggtggtaacataacaccgttttcctttgtttcctttattcaaacttctcttgtactatgtactagagcatgaaaacgtctttgacctacagttatgttagctggagacacagcagaactactgttgtcatcttgatcctgaatacaagggccgattgaagccccagaaatcatggggaagtactcgtttacataaagtggtcatgtagataatctaaaatatgcccgttagtgtattaagatcataactgcctaaagcttcctgtgccaggagtggtcttagctctcaaagaagtcatagtctggccaggcgtgatgactcatccctctcatctcagcactttgggaggcgaaaggattgcgtgaggccaggagtttgagaccagcccgggcaacatagcttgatcccgtttcttaaaaaatggaagtgatatccaggtggggaaaccttcctgctgtagtggagcctcttgagatggcacacgtattttgctcacaggtgctatcaatatatagctctggttcttcagaatataaataactatcacctgaccccaataccttatctatattgagattgttcattagatccaaaacatcttgtgcatttcttgctttttagtcatgcacagaccttgtctttactttcaaagacagtttggtactgaaaattgctctggtaaattaacacaatttatttaatccctgctctttccaatctttagcaacgtttttttcattgtcaccatcagatgaccttgctgagcttccaagtggcaattgcttttgttgtattgtttaaaggcaaacaaaaatcaattattattggctctagagtgcctggcgaggtggagctcagttctttgtgcattgcgcactatgctgctggtgtctcagctgccatgcttatggttgcattactttcctgtctagctttggtattcttgcctttaaaaatttctttttccatttgcttttcttagccagtgatgacagtaaaataaggaacgacctatttattgttttaagagatacgctggatggtgcccaggcagatgagcattgccattcaaggtggcttcttggtagactgcatttactcttaatcgggtgcctgtgggtcagtgcatttcttggtcatccttactctgtcaaagctgccttgttagccaggttactagccatactagtctcattaccttacgataacacctcattcaaatggccttaacgaagttgaacacttatcttagtcactatggttggctttgaaccttttctagaagttaagtttattccctgggaaaaaacgtgtttgccaccacacagagtgctgggtgtactgggaacccggcttcaaaggcaactactccagtagggaaggttgaggagggtattgaatgatagctcactgcttaaataagtgtttagagtcccaaggtatatgtaatggcatatgaaatgcctagtgtttaaagaatattcagaaataatcagtcatactctttaatattcatatctcatagagttagcatcaggaaggaaacttggtagattaaataaaatagcagaaattactgctggatttttgtacagtagaaatgtatgcacatttttctcccctagtagtcacttaagttgcatatccatttcctgttacatctcatgacatgttttgggtaaaccgtttttggaagcgtccatttgtgtagaagttaggtggttctgagtttaactttgtacacatttctaggcacaaggaaattaaataactggctgagtgagagtgatctcgttgaatgctgaggcttgtttgggaattgggtttattttggtgaaatgtaaatttagatccactctgtattagtttttttttttttttttttttttaacggagtctctctctttcacccaggctgaagtgcagtggcatgatctcagcttactgccaccatgccaggctaacttttgtatttttagtagagacggggtttcaaccatgttggccaggctggtcttgaacgcctgacctcgtgttccactcaccttggcctcccaaactgctaggattacaagcatgagccatcgcgcccggccaagtccgtttttacactcctataacgacatacatgagactgcgtaatttataaagaaaagaggtttaattggctcacgattctgcaggttgtacaggcttctgcttctggggaggcctcaggaaacttacagtcataagggaaggtgaagaggaagcaagcatgtcttacatggaagaatcaggaggaagaggggtggggtgccacatatttttaaataaccaagcacagactcactatcacgagagcaacactgaggggcaaaatccactcccatcatctcatctccttgtaccaggcccctcctacaacactggggattgcaattccacatgagatttgagttgggacacaaatctaaaccatataaccctcatacacatgtattgtaattcagaatttgtcattttaaaaaaaaatttttaagattagcttatcaatttaaatgtttccagccctgaactctcaaagtcaactttaatgagttttgatttttgccgagaaagatcaacagcagaagaaagagaagtataacaaaacttagctccacaggagcaaactggagaattggagtactggtttatgattttggtcagttaagcagaatgcagtcctagtttaaacaagactggataaaagtccaaattcaaataccattcttacaagtgtttgaatttaattttgtcagtgtacatacatatatctagtaccatagtgatctcaggctttgaagaatgaaaagcaaaagaaatgatttagagtcctggtccaaccactcagctatctgatatccttttgctattttcgtttaaggggttatcagggaatgagctaatttgacattttctgcttaaagcaatggttggggctgggttggggtggagagagctgctctgaggaggtggtgtggggggcctgcgaggacacacttgggttacctggtacatctgcagttcccatggaattgggtctcaaaactgagaaatggaagtgtgagctaggaagaggagtagcttaatggggactttgccacacttttagtgctcctgtagctgcacacatgttgttctttgtaatgtatgatttgtgtcccagtggaacacttgaggagtgggagctggagaaaggaatgttgtacagtgttgtgcagatgtgggtgagatgaggtgatctgggaagctggcagtcttagttggcccaggaatgccaggacctgagatgacagctgctggtggcagcggggaatgcaggtgtatctgtgtcgaggttgggaattggactttgaagggctgggacttccagaaggtaaaatgggattgcactgtttgggagaaggggtacagatttttttgtttgcttttgagataaggtctccctctgtcacccaggctggagtgcagctgtgtgatcatagctcattgcagcctcaacctcctaggctcaagcaatcctccttcctcagcctcctgagtagctgggactacagacatgtgccactacacccagtgaatttttttttcttaaagatgaggtattgctatgttgcccagactgatcttgaactcctagaattctttttttttttttttttgttttgttttgagacggagtctcgctctgttgcccaggctggagtgcagtggcatgatcttggctcattgcaaactccgcctcccaggttcaccccattctcctgcctcagcctcctgagcagctgagactacaggcgcctgccaccacgcctgactaattttttgtatttttagtagagacggggtttcaccatgttagccaggatggtcttgatctcctgaccttgtgatccacctgcctcggcctcccaaagtgctgggattacaggcatgagccaccgctcacagccgaactcctagaattcttaaacattaaggacagaaacatctctgttcttaatcatgatttgcttttagtctcagcagatggaaaaatgatttacttgcaaagtgagagagctagatgaggaaggaaagaatatgattttgtaccactcagagaaaaatgtgagcatttctctactgtcttgggttggttattttccgttgattcaaaattgctctgcaggagacataggagaggcttgagagatgtcagtgggtggccatggctcagccttgatcctgagtgggtgggaatactctgttaatggggcaaagtggaccctccaggtccttcatgctccttttggaaagaagcgttcctggccagacacagtggcttacgcctgtaatcccagcactttgggaggctgaggcaggcagatcatttgaggtcaggagttcaagatcagcctggccaacatggcaaaaccccgtctctactaaaaatataaaaattagctgggtgtgatgatgtgcacctgtagtcccagctacttcagagctgaggcacaagaatcgcttgaacctgggaggtggaggttgcagtgagccaagatcgtacccctgtgctccagcctgtgtgatagagtgagaatctgtctccaaaaaaaaaaaaaaaaaaaaaaataggaaagaaaatatatgttcccctgtggttccctgttataccctcttctcttgaatagtttatcagaagggacaaccagctcctcatgcccttcctcagcaagtgtcaacagtgtgggagtgcagttgataaagcttgattttcacaactctgcaagtagctgagctccaccagtgttagaactgaaattgaggttatctcaccaggaaccaactttcagatgttgaagccagtagaaatttagtaatgtgggaaactgataactaaaagtattccaggttctaattattttgtcagctcagttttaggaagcagtcctagggattcccctggaagaaagtttggctggatagagggcagtgattgtgaattttctagatcttttgtggactgcttctgttgttaaaaaagcagcagtctctcagcacacgaatgggaagtgttaatgctgtaactgagtaacactgatactgagtttaaaataatggtaaatatcccactgaaatttcacccccagtacagattagggccttggaatgctggatagtggattaaggacatctgaaaatctacttcataaaagcagtgagaacattggcaaaacctattaatttcaagtttttcagaaccatggaaattagttaaagatttctagcaatctgaggaatgattgttcaagaaaacactgggatctcagtaggaacagtgaaccttgtgttttaacctgctgcaatcccattcccggcccctgaccacctccttggtggccttgaaaaccagcagcctcacagccatggcagctgtgaaactcagaagtctgttaaaccactggaagggacagaacagaactggagctcttgaaggaccatcctcaaagaaatgtcacaattcgaccatttggcagcttgcttgaaagggcctttctgagggctttgtctttgtttcacccaacacaggtcagctcacattgtgcaaacagctctacctgctgagcatttgttgaaaacaatcggtggtagttgtttaatcacagctgtctgaggtggtgttgctaattgaggccaagtggctgaccaaaaaattttttatttttattttatttatttatttatttatttttttgagacagggtctctctctgtcacctagcctggagtgcagtggtgtaatcgtgactcactgcagcctcaacctcctgaatttaagtgattggtcctcccacctcagcttcccaagtaggtgggaacacagatatgtgccaccatgcccagctaatcttttaattttttttgtagagatggagtctccctatgttacccaggctcaaacagtttttttaaaatggagaagtaaatgttccttgacgacttcaaaaagctccaacatattcctgggaatctagaaggctctgagcattctgagaaggctctaccttctctgctgtggcgatcttgaggctttatgcaagcctcaaggaagactaaggtagaattataaaccattcagcagagtgttgaaggcatgccccaatacccacacccacacgccctctcacctacccacccacccacccttagtaaaggctggaaaatttattaattcaaggcatgtaaggaaatctctgtgtagttactagcgaaccactaaactaagagtcttcagtggccatacatggcaaacaaaaaacaaaacaaacagactttatagaattagttcctgaaaatcactaatcagatagcaacaaaacaaaccctgggatgggggaagaatttgatttttagaattgacacattgtattagataaaatttctagtctttgacaaaaattagaagctatctcaagaaacaggaagatatgtcccatatacaggttaaaaaaacacacacacacacacacctcggtttctgcctagtttctaggatagaaactgtccttgatgaagcgcagatgttgggcatacttaaaacttaagtcactatgaaagttatgttcaaataactataggaaagcatgtctaaagaatcacatgaaaatatgcttgtgaggttgaagccaggaggattgcttgagcccaggagtttgaggctgcagtgagccatggtcatgatcaggccactgtactccagtctgggtgacagagcaagactctgcctcttaaaaaaaatattgggtgaccaaacagagaatgggaataaagaagtagagattataaaaaaaagaaccaatagaaattctggagtcataaactctagtaactgaaatgaagaattcactggaggggcttagcaggtatgaactggcagaagaatcagtgaactggaagacaggtcatttgagatagttcagtctgaacagcaaaaataaaagaatagaaaaatgaacaaagccttagagacctgtgtaacatcatcaaccatacccataatgggagtcccagaagagggaagatgtaaagggaaaaagaaggtatactgtgaatagttgtgtgtttgttctcatgccgctaataaagacatacctgggactgagtaatttataaaggaaagaggtttaattgacttacagttccacatggctggggaggcctcacaatcatggcagaaggcgaatgaggtgcaaagtcatgtcttacatggcaccaggcaagaataggagttgtgccggggaactcccatttataaaaccatcagatctcatgagacttattcagtaccatgagaacagtatgggagaaacttcccttatgattcagttatctccaccttatcctgcccttgacatgtggggattacaattcaaggtgagatttgggtggggacacagagccaaaccatatcaagttgtatgccaacaaattaggtaacctaaatggaatttatacaaattcatgtagatgcaaatggccataactgactaaagaatttgaaaatctgaataggccaataacaggtaaagagattgaaatagcaatcaggaaaccttccaccaaaaaatactgggtcacatggtttactgggtaaattcactgggtgaattctaccgagtattattataaactctttcaaaattttataattaacctgataccaaactaaagacatcacaagaaaactatggaacaatatcccttataaatacagaggccaaaatcctcagtgcaatgctagctttcctcccattctcactacttgtattctgtcataaaaaaaggattgtacaccgtgacaaagtggaatttatcccaggaacaaaaacttggttcaccataccaaaaccactcaatgtaatctgtcatgttaatagaataaaagacaaaaaccacatgatcatctcagtaaatgcaggaaaatcatttgataatattcagtactttttcttgatgaaaactatcaactagtaatagaaggaaaattctacaatttgataaagactgtctatgaaaaactcacagttaacatcatacttcatggtgagaaattgcatgctttctcctaagattatgagtgagacaaggatagtcattctcaccacttctatgtagcattgtactggagattctatctaggacaattagtaaaaataaaatagtaatataaataaaagcattgagattgtaatggagattggaatagaactataactagaaaagtatctgtagttacagttgacatgatcttgtatatagaaaatcctaaggcgcgcgcgcgcgcgcacacacacacacacacacacacacacacacacaaatcttgaactaataattgagtttacaagcttgtacatacaagaacattgaagcatccagaaatgaaattaataaaacaattccatgatacagtagtatcaaaaagaataaaatacttgggaataagtttaataagtttatgatttgtacacaaactataaaacattcttgaaggaaagtaaagaagacctaaaaaacaaaagaaaggacattccatgttcacggattagaagacttacattgttaatacggccaatactccccagattgagctgcagatggagtgcaatacctacaaaatcccagctggcttttttttttctcagaaattaacaagtttattttaaaaatcacatggaaatgtaagggacccagaataaccaaaacaaccttgaaaaagaacaaagctggaagactcacacttctcaatttcaaagctttgctacaaatctacagttatcaagacagtgtggtactactgtgtggacagccatagagatccatggaattgaattgagagtccagaaatagacccttaactttacagtcagttgtgtttttgacaggggtgttaggacatgaatggataaagaagatgtggtatatccatacaatgggatattattcagccattaaaccactaagctcagataaatgcatggatgaaccttgaaaacgtatggtaggtgaaagaagtcagacacaaaaggccacacgtttatttgaaaattctggaataagcaaattcagagacaagaaatagatgagtgttaatatgtgctggaggctggtgggaggggagaatagggtgtgatggtagtgggtatagagtttcctttgggatgatgaaattttctgtgattagctaatggtgatagatgcatagttttggagacacattaaaatcaatgaattatacatttgagaggggcagactttatggtatatgaaatctcaataaaacgtatttaaaaacaatatacagttaagagcgcatccagatacacctaaggtattagtaaagcggtgcattaagctgaaatatctggcttgtgcaaacttggggcatttgtaccttatgtagaattccaaaatctgcttaggattttccctgtccactggactgccactggcagggtctgcttccctgttcctgggttgagggagcagcattggagcatccctcaattcctgaatgaggaagttagttaaaagggcaatgtgagctgtagggccacactcatctaacaggtgagcttaagtttccattgatggcagacctatcagatgtttcctcccattctcactacttgtattctgtcattttgctcttatcctcccaaaatcatgctaagattttttttttttttttaagacagagtctcactctgtcccaggttggagtgcagtgatgccatctcggctcactgcaacctctgcctcccgggttcaagcaattctcctgcctcagcttcctgagtagctgggattacagttgcgtgccaccatgcctggctaattttttgtattttttttttttttttttttaatagagttggggtttcaccatgtgagccaggatagtctccatctcctgaccttgtgatccgctcacctcggcctcccaaagtgctgggattacaggcgtgaggcagtgtgtctggccactaagaatttttaaaataagtgacacaatgaagaacaaggccatagagatgatcttgggtaatttgagggtatcaaaaagtatctgcctgatggatggcttgagacactaaaaatgagtaaatgattacaaagtaaggaatgataatttgttttgaagaataaaacagattcttgtctctggtggttgagggatacgactgatgctgtatattaagacaagaagatgaagcccaaatggcagggaaattgaagagaagatacaggggtatctaggcacagggttggctgtgaaagtttcaatatgtaaaagatgataggctgaaaggaagaggatggtggaaaatacaaaagaggcattgataattcaggagtgtggagtgtgagagaagcttctccataggtgaagagttggatggacagtggttgttaggtcaaaataacaataataataacctagcacatatgtcagatatctgtttgggttcatcttacgcaccattctcttgggagggagcatgctttgaacagatccaatttatgatggagttttaggaccagaaagcgtcgtagtagcagagacttctcgtcctagagagcaaaggggaagtcattttttagttagttagtttgtgttttagacagtcttgctctgtcgccttcgcctcctggatgttcaaacagttctcccgcctcagcctcctgagtagctgggattacaggcgcacaccaccatgcccgactactttttctacttttttagtaaagatggggtttctccatgttgtccaggctggtctcgaactcctgaccttgtgatccaccctcctcagccccacaaagtactgggattacaggcgtgagccaccgcatccagccttagtttgtttctgagatagagttttgctcgtttcatcacccaagctggagtgcagtggtgtgatcatagctcactgcatcctcaaacttgtggggtcaagggatcccctcacttcagcatcccaaaatgctgggattacaggtgtgagccactgcatctagctgggaagtacttttaagagtatttttttcaggctgggtgtggcgcctcatgattgtaatccaagaggtttggaaggctgaggcgggagggtcacttgagaaaaggagttcgagaccagcctgggctaacatagcaagacccccatccctacaaaattttttttttaaattagctggtggtggtggtgtgcactggtagtcccagctactcgggagtgaggcaggaagattgcttgaatccaggaaattgaggctgcagtgaaccatgattgcaccacggcactccagcgtgagtgacagggcgagacccctccagatgatagctggagatcatgttattttcttactgattttcccccggtttagcaatacaaagtgatcgttaggttggcacaaagcacgatggaaaataaccattgttggcatcaagagaaatctcacaccacttgataaatatagtgaactagattactaaagagtgatttccctggattgcttgaaccagggctcagtgaaaatgttgctgtttgctttttttgtggtcaggattttttgattaaatgagaagcctacaaatatgcaagctagaaggtgttgtattttgggattaagccagactgtagcaggatgttagtaatttgagttgcataaactaatctggggaggcagagtgagtagctgatgtcacatgaagagcaaacccttgattccattcgtaatacataatagaacaccttcgtttctaaaactgggtgcagtaaagcataaaaaaacctttagtagctgatgaaagattctgccccaggcttgagtctattaaccagaaaaactgaaacaaaattaggcaaggtggtaagttttgctttcttttagtggaatattaggatatacagcaaatggtagcaggaccacgttgggaaaagggccaaaagactttttaaaaatcctgtttgaggtttggatccattttctttcatttttggacatacctttgagtagtgggtaaactgagagctcagtgaggtgagcctgtgtctttcagcgggcgggcgggctggagttggaactcctgtttcagtggttttcagatcctgctgatctccagaatggctccagttcccccacccctaatgctttattatgaaaaatttcaagcctgcagaaaaggtaaagaatgtacagtgagcacccatataccaaccacatggattctgcaatgaacattttaatatacctgcttttttttttttttttttgagatggagtcttgctgtgtcacccaggctggagtgcagtggtatgatctcagctcactgcaaccactgcctcctggattcaagcaattcttctgcctcagccttctgagtagctgggactacaggtgcgcgccactatacccggctaattttttgtatttttagtagagatggggttttgctaacaggccagtctggtcttgaactcctgacctcaggtaatctgcccgcctcagcctcccaaagtgctgggattacaggcgtgagccaccatacccagcctcataacggctttttttttttttttttttttttttttttttgagacagggtcccactttgtcactcagtttggagtgcagtggtgtgatctctgcagccttgacctcctggactcaagtgatcctctggcctcagcttcctgagtagctggagctacaggcatgtactaccatgcccagctaatttttgtattttttatagagataggcttttgccatgttgcccaggctggcctggaattcctgagttcaagcaatctacccacctcggcctcccaaagtactggaatctctttttttggaatacgtttcaaagcatgtgatagacatcggtacagtacagtcctaaacactgagtgtgcacgtcgttaactacagtttaatatttgttttgtttctggatcttttccagggatttttttcaagattaaattccaagcgccatgatagtttctgagttagaaggatggggcaggcccaggaatcagtactttgaaaagctcccaagtgcttcttgtgatgcatcgggtttgggatcttctgccccagggagcgcttcccgattacttcatagctaatcctcacctaaaatgcagaggtgggcagttatctttaacctgaccatagagctccatttttggttttcttggaatcttttgtttaaaacagtggttctcaaccaggggcagttttgtgcctcgagagacattggacaatgtctgggatggtttggttatcacaccagggggcatctagtgatgagagatcagggatgctgccgagcatcctgtaatgcaccggacagccccacaggatggggagttatctggaccaaaatgccaatagtgctgaggctgagaaacgtatttttttttttttttttgcctaaaagaaaattgcttgctccagatgactccagacaaaccaaaataaaaataaaaagtaaaaactaaaatgacaacatgaaatgaatttttaagagccaaatgagacctttagagacaatctcatcactgcctacctggtttccgtcaaatacagatttatgctccagaaagtacctaatttattaaaataagctgatttctaaaagcttgttagatggtcagtaatctcaaactttgagtgaatttacttgaaaaggtaatgttgctggtggcctttagtttcttttaatatatcttaaatatgatatcaaagaaaaacagaacatgatgctttgggatgaatgtaatgaatgaaaagcaggattctttggcaggtaactgtgtcccaggccctgtcctgcagggtggcagggatgtgctgagctgggtgaggggggaccgctgagggcttctctcagtagttgctctgtgtagaattttctgagtgtcttgggagaatgggggcatttttcctgaaggtctcacttgactccacagtgaatggctttacctgtctcttgagtaagatgcatttctagtaatgctctgactacttagtccacgtttgactagtttttaggaaaacaatatgtacaatggaacagaaagcttacagaaataaagggcagttcttttcttgaggtgaaagtgatgtggggagccagtaggtgacaggatttgctctggcccctccgagggaggaggaagatgaaggtgaaacgtggtattggtcagtccgtttcctgcttggttgatttcagggacctgatgagacaatatggtggtgaaaacagactgctggattgcaatgggcggaactgggcttagtctctggataggtgtcagttcatttcacacctgtcattgagggaaaataatacctgtatggctgttggaagattaaatgagactatgaacgggagctgtgtggataaaatgtaccaggcactcccagtgccagaaggtgttcttgttagttctgggtgtggcgatgtgcgaagacacccgtgtctgcggggtgtgtgtgagctgcagataaccagcaggtcctgctgatgaggcaaccttcttgggagtcttggctcagttccggggtttaattacgatgtatccttgggcaagtggcttaatgtctctgattgtaatttccttcattttttcatatctaaaatgaaagaggtgcttggatattcctaagggttcatctttaggagtctgtacttctggtgtggagctttctggaaaaaggcttctgggaatctgaaatggcagtagtgatgggcgtggtaacagcagtgttcatacgcttcctcagtaattttatgtaacaaacactcacagtgtacttactgcccctgagatcttaaaaactctcactttcaactttcacgacaccctataacttaggtaactgctattatccctggtatacagatggggaaactgagcctcagagaggttggtgatttgccccaagtcatagctgggaagtggcagacctcgatgggatgcaggcaccctgccctctgggctccgatcacttggccacctccccgcatgcaccacatgggctgtggagttggaggcatttgtgggcttcaagaatgagagttggtggggagtatgtgtgaggaaccggaggggtcatttccctgggactgggattgtggaggttttgattttgcttttccctttttaaactgggtgaggtatgagcatgggaactctgtacggaatgtgtcattggagagggacagcagggacaatgaaggtagtccccagagaagtatgagaaactggcattcagtgctcatgcagaattctctttgttttaataataatacaaataataacattaatattatttttagaggcagagcctcactctgttgcccaggctggggggcagtggcacgatcatggctcactgtagccttgaactcctgggctcgagccatcctctcacctccctcagcctcctgagtagttgccatgcgtaacaccgtgccttgctaagttttaaattttttgtagagaccgggtctcactgtcttgcccaggctggtctcgaactcctggcctcaagcagtcctccaccacagcctcccagagtgctgggattaaaggtgtgagccactgcaccctgcctaggattctctgtagatggggagcccacctgggtgagatgccagacacctggctccggcatatgcacagcagtttcacacgagcgtctcttactcaggtttcagagttctggtaaaagatttaggtttgacatccaccctttgaggtttttggttctcacatgtttgataacctgaagcttgtgggtttgatatgggcagtaaagtgggattatttctgttagagatccttattccctagagactttctggtctggaaaggtgagaggctatatattcattagctggaaccaccatgtggatcatttgttggaagaactgttaggaagaagacagatattgctatagagagcagggccagatgagcgagaaggcaaatgtacttcattcctgtacctgcaggcttattagggacagatgccctcaggcggggatgtgtagcttcacttgactgctctaaataaggagcgagagggtggtgtgtgtgttaaccatcaagattaagcaagcaagaaaaagacaaaagaaagccatcatttagtaactggtggagtgagttggagcctgggagctgccccaggacaactgttatttcccttgatcttcctcaaaccctaccaggaagtgagggcaacagttccctaaagcagccccatcaagctcttaagaaagcagtttcactgggagtggggagaggtagaattgggaggtggtagagggctggggggtatgaaatgtgagggccggagtcctcagcatcggaactccagaaataaaaagttgtctgggtctttgaaagcctcctatatgataatgttacagtaacagtgttctctgctactttcaatgaataaaaaacctagggtttctcagctacagtgtgcattaagagacatttgtggtctagttttggcacttcatttctatttgggaacatgcattctgagttttagacaactagcttccaaatgaaattttggaacaccaccctttttttttttttttttttttgagatggagtcacgctctgtcgtctgggctggagtgcagtggcgcgatctcggctcactgcaagctctgcctcctgggttcacgccatgctcctgcctcagcctcccgtgtagctgggactacaggtgcctaccaccgcgcccggctaattttttatatttttagtagagacggggtttcaccgtgttagccaggaaggtctcgatctcctgacctcctgatccacccgccttggcctcccaaagtgctacgattacaggtgtgagccaccgcacccagctggaacaccacccattttttaaagcagagaatttattgttatttgcacaaaaggacgtttgaacactttaggaaatctggatgctggaattaactcggtcaaaacaaagcaaaacacacagaatctcgtatcttttcctgccctgatgctgaactgcagccttgatttatgttttgtttttccacttttgtttctgaacctatgtggtacaggctgaacccttgtccctgcttcggagcacttaccttaattattatagaaaaaaattaagagttggctgactctgtgctgaactttctggtttttttccaggcagtttctccataacaaatgcgttttgcatagaattgaaattgcctatttacctcaatgacaccatcctaatagttggtggtaactacctaatctaataatctctcattgtgtgtgatagggctatttattgtattttagagtgaaataatgcattttgtttgcattttaaaaaggaatggtacaggaaatgattgtaatccaggactaaatatacagtttgcagtctttttattctaattgctttctgatgaatatatatatatatatatatatatttttttttttttttttttcttgagatggagtcttgctcttgtcgcccagactggagtgcaatggcatgatctcagctcacttcaacccctgcctcccgggttcaagcaattctcctgcctcagcctcccaagtagctgggattacaggagcctgccacaacgcccggctaatttttgtatttttagtagagacggggtttcaccatgttggccaggctgggctcgaacttctgacctcgtgatccacccgcctctgcctcccaaagtgctgggattacaggccttctaataaatattattttacacatcgagatagtactgtttatgcattttgtatgctgcctcttaaatctataagcattttcttttcttaaaaaaaagctttgggctgggtgcattggctcatgcctgtaatcccagcactttggggggctgaggcaggtggatcacctgcggtcaggagttcaagaccagcccggccaacatggtgaaaccccgtctctgctaagaacacaaaaattagtcgggcatggtggtgcatacatgtagtcccatctacttgagcgtctgaggcaggagaattgcttgaacctgggaagcggaggttgcagtgagtggaggttgcagtgagctgagatcacaccactgcactctggcctgggtgacaagagcaagactccatctcaaaaaaaaaaaaaaaaagctttgataaatattgtacatgattgcaaagcgtcccatcgtgtggatgttcacttagttatttgatacatatttttgtgttcttgggctgtttctaatatttctgtattacaaataaggtgatgggaagcagtttcattcatcaatcattctttttaaatgtcccttcctatcagtttctgttaatcagtcaaaagcgtatacattcttagcaggaacttaaattcttagtaggaatcttaacaggttaagatttctaagggtagagagggtacctgttttgttaaccggtggcttaataccatttaataccagtaaaggctcaataaatgtttattgactgaatgaacagaaaagatcagtgatcatgaagaatggcccagttagtggtatatatacgagaagtgctgcagtggttcacagtaacatgataataactaattgtgtaatgatttggcacgaggtactgatctaaatgatttatacattgttgcatgggattttggaaggggagggagtatacctctaaattagttcatgctatgggatggaagtaagactttaaatttaggtgggctcaaaaaacagaaacaaaccaggggccgggtgcggtggctcacgcctgtaatcccagcactttgggagtctgaagcgggtggatcacgaggtcaggagatcgagaccatcctggctaacacagtgaaaccctgtctctactaaaaatacaaaaaaattagccgggcgtggtggcgggtgcctgtagttccagctactcaggaggctgaggcaggagaatggcatgaactcgggaggcagagcttgcagtcagcagaggttgcaccactgcactccagcctgggcgacagagcgagactccatctcaaaaaacaaaaaaaacaaaacaacaacaacagaaaaaaatcaaatgttcgtcagctgatgagtggataaacaaaatgtggtatatccatacaatgaatgctatgctatgctgccataaaatggagtgaaacattcatacatgttgcaatatggatgaacctgccactcaagtagctggtactacaggcatgttccaccatgcctggctaatttttgtattcttagtagagacagggtttcaccatgttggccggcctggtcttgaactcctgacctcaggtgatccacctgcctcagcccctcaaagtgctgggattacaggcgtgagccagtgcgcccggcccaaagcttttttttaagaaaagaaaatgcttatagatttaagaggcagcatacaaaatgcataaacctggaaaacattatgggaactgaacgaatccaggcacaaaagaccacatattgtgtgattccacatattccacatattgtgtgattatatggaatgtttggaacaggcaaatccacagagacggaaagtagattagtggtggcatagggctggaagaggaaggaaacaaggactaactgctaatgggtacaggattttttttcctcaagtgatgaaatattcttagattatgaggatgcttgtacgactctgtggatatactcaaaacgatttaattgtatactctaaatgggtaaattgtgtataaattatgtctaaataaaaccatgaaaaattggatgaggtttagcattgtagaaggaaagatgggggtggtggtgtgttagtttttgagggctgccatagcaaaacaccacacactgggtggcttaaacagtaaccatttattttctcacagttctggaggctagaagtccaaaatcaagatgtcagcaggtttggttttccctgaagcctctctccttggcttgcagatggccacctggccaccttctcactatatcttgtggggtttttgtgtgtgtgtgtgtgtgtgtgtgtgtgtgtgtgtgtgtttgagacagggtcttcctctgtcacctaggctggaatgcagtggtatgatcatggctcattgcagcctcaacttcctgggctcaagagatcctcccaccccagcctccagagtagctgggactacaggtgtgtgccgcaatgcccagctaagtttcgtaattttggtagagactgggtcttcctatgttgcccagcctggtcttgaattcctgggctcaagtgatcctcccacctcagccccccaacatgctaggattgcaggtgtgagccactgcgcccagcctggtcttgtctttgggcacaaatatccgctagtgtctcattgcgtgtccacatttcctcatcagctctactggattagagcccagcgtaatggcctcattttaacttaatcacttctttaaagtcccagtctccaaatacagtcccattctgaggtagtgaaggttaaggctccaatgtgaattctgggggaacatggttcaacccaatgagaacaatggttatctgttgggagtgaggactgatatgagtggagatgcatcggtaaagatgcgcggaccacagatgtgacgcagcaggtgtgcacagaggtatgggatggggtcagtgtggagggccgtgtgccaggcagcagtgtggacttggtcctctacccagcgtaggggggtcattctgggggctgaaccgagggtgacactgtaaaaccatgcttcaggaaaattcatctctgcgccctggaggatggactgaggagggaagaggctgagggaaatgagtgtgcaagataatgaggcgatcccaagggaagtaaaaggattggaggccttgcaaaagcaaagcgaacccaagcttcagaacggaggcatctgagatgatgtcacagttttgaaccttatttatagaagaaagagggtgaaatggggaattaggtaaatgaaaatataggtcccattgttggtaagatacatggagtgtcattgattcagtatttagtgtgcttttccttattttaaacagctttcatagctcacttccaaactgtatttttgcaaccaactctttttctctctctattaaaaggagaatcttttattttacactaattaacagctgattctcctaagagagttttcaggaacctaaacctcagagttagatggagacaagtgtctttgttaatcatttatgtgaggtcagattgtacaatttgtaacagattttacagctggttcctttattaagggatgggtaggattcctactaattattattttgagttttactttgtttttaaccattgaaacttgggggatgtactctttggtttgggtagattttgcttatagatattgaagtttgagttgttgaatttcatacatattttattttgacttttaatcctttaaaacatttgactctgactccattgagctctgtagaacatctgtcatccagatcttttgccagaatatagagccttgattggacaccttgccagctaatttaaagcttcccaagatgcagaatactgtgtaaaatgtcctacctgttgtgtcagaagggagaaaataagacgagattttcatatttgcttgtagatccataagaaacttgggaagaattcctaagaaactagcagtagtggttccctgcagggtgggggctctggatgtgggtgtggcaggggatgggagagactggcaggttgaggagcagggtgagagggatgtttttatgatgtacattctcatatatttattttgaactatttgaatgtattactcatgtaggaagacaaacctttactttccaaaaatattagggaaaaactttcaagtctctcatttttagcctttttgttgttctgatatttccacacaggacagacggtaacatgcccgatacattttaagtacaaacaaggctgtaagttgccttacttgactttcttcactattttctattcaaaaaagtatttttgaatccaagggaattagaggaataatcttgaaatgattatgttttgggggaaaagtatattattaatatgatagttatctaatgttgtgtaacaaattgcctccaaatttagcatatgaaaacaataagcattcattgtgtcacacattcattctttcttttcagtgaaagttaacctgtttccatctgaatagatttctcactctgtatcctgccagtaatcattttgtactgtttctgtgcctttcaatccaagagtccaacctgatgaggttctgctggtgtaattcttttaaaagcattgtggatgtcctgtgaatctcactggagttcactttttaaacattagacttctgtggagactgctgaaggacaacacccttacttcttagggcctttggtttgccagaattgttctctgagccattgccttggattttttcctgacttcttaacaaaggattttataggtgggaccttcaacactctggaaattgccttagctacattcagccatctccttaggtacattttccatctcccacattgtagcaggcaatggcgttgctaaactttccatcaggaaataacaaagatctccttttccagtttccagtaacattttcctctctacaccatcatccacagtctcctgaaaggccctccaggttctagcttttccagggctcttcaggggttttcgaactctctttttacagtctttccagttcctgcccattgccacgttccaaagtcactcacacattttaggaatttttctttttttctttttagcaagcataccaattccagttaccagaatctgttagtttttgttatgtgttgccgcagtacagattgcctcaaagcttagtggctgaaaacaaggaacattactggccaggcacagtggctcatgcctgtaatcccagcactttgagaggccgaggcgggcggatcacctgaggttgggagtttgagaccatcctgaccaacatggagaaaccccatctctactaaaaatacaaaattagctgggtgtggtggtgcatgcctgtaatcccagctactcgggaggctgaggcaggagaatctcttgaacctgggaggcggaggttacggtgagctgagatcgcaccattgcactccagcctggacagcaagagtgaaactccatctcaaaacaaacaaaccaaacaaaaatgaacatttactgccatacacacttcctgggggtcagggatcccagagtgtctccgctgtgtcagtatgtctcagggtttcctgaggctgcagtcattatgcccgctagggcttgggtgggactgaagcacctgcttccaagttgcctcactcacatacctggcaagttggtgccgttgctggcaggaagcctgcttttcttgccaggtggacttctctgaggggtgcgtgaatgccttcactacagggcagctgacttccctcaggacacatgattcaggagaccaggggaaagctgcagtgtcattttatcacataatcccagaagtaacactctgtcatttctgcaatatcctgtgggttacacgtcagcattattcattgtgagaggtgactacatgagggtgagtccaggaggcaagaattattgggggctatcatggaggtttgataacataattggtaagaaattcagatacacctcagacttgattgtggcataccagtgtgttgtaaaacttgtgagaatggcttgccttagaaagacaagtagtccatccagtgtcttattcttatgttaagttgggattgctattttgttacccttgggcctctatatacaaagcctctcatagtaatagatctaattgggttgaagtttagtattatgtatatgccctctgcttttattagtagattttactttcgtgaaaggaacatataaacttcattattgcatttttgtataaatgcagctggggacatggttttattacccaatgtccattttgtaaatatttagagaactttttttttgcatcataaatcagtataaatagaagcttggtttccattgttgccctggctatgaggaagctgagagtgaaatttgtcgttcaagtgtggcagttatgttactgactggcgtatttatattctcctttatttgatattttgctatgagatgttccagtttacttgtgggaaaaaaagccaggtgttcttgaactcaacaaatatttattgaattccacttgctggccagacagcattccatgtgccccagatatggcactggacagatagataaggtccccactcgcctacagcttccaacctggtcgtaagaaaataccttagcttttgctccataatgtggaagaattggcctcagagaaaacctaattcatatgtaccacgtttctacccattcaagttttatttcataatttttttttttttttttttttttttgagatggagtcttgctctgtcacccaggctggagtacagtggcacaatctcagttcagtgcaacctttgcctcctgggttcaagcgattctcctgcctcagcctcccgagtaggtgggattacaggtgcatgccaccatgcctgactaatcttttgtatttttagtagagatgggctttcaccatattggccagcctggtcttgaactcctgacctcaggtgatccacctgcctcagacttccaaagagctgggattacaggcgtgaaccacgatgcctggccgtatttcataattctatctttccatagaaagaattggctggggcacgtataactaatgtgagttactgatttcagaggaagcttttggaagtggttgataggcactgaatgggatggggtggtgagtggtttaaaataacacttgaacctttggattcaaatggttttaaatgcatctcagaaaagtgaaaggtgaatgggagagctacatccattgagagcaagggttcatcagctagggctgtggcttaaactaagcagatattctttcctggcagttctacaggccagaagcctaagatcaaggcgtcatgagggttggtttctctgaggctcccagacagtcatcttctccctgtgtcttcacggggtctttattctgtgtctgtgtccaaacttccttttccttttttttttttttttgagacagagtcttactctgtttcccaggctggagtgcagtggcactatctcagctcactgcaacctccatctcccaagctcaagtgactctcctgcctcagcctcctgagtagctgggattacaggtatgtgccaccacgcccggctaatttttgtaattttagtagagacggggtttcaccatgttggtcaggctggtctcgaactcctgacctcgtgatctgctcacctcgtcctcccaaagtgctgggattaccggcataagccaccatgcccagcccaaacttccttttcttagagggtgggctttatctgtggttcttagttagcctcaccttcattcttccttttggtgttacggtcttgcttactgctttgggaatggatttgttgaaactacatgtgactagtttagggacccagtaggaggttttactataagtgtaaattaacatgtgcctttgggggaccttaaaagtttttgtcattgggccatgagatctgagtgcagctggtagaacctccttgttttctttggtatgagaactcctgggcttttgttggttccttccgttttctccggtgtattaccatttcacatcacagtgatattatccagataacacccatgatttgtttttaacggagtttcactctgttgcccaggctggaatgcagcggtgcgatcttggctcactgcaaccttcacctcctggttcaagcgattctcctgcctcagcctcccaaatagctgggactgcaggtgtgcaccaccacgcctggctaatttttgtatttttagtagaggcggggattcgccatgttggccagactggacttgaattcctgacctcaattgatccacccaccttggcctcccaaagtgctgggattacaggcacgagccaatgcacctggccacacctgtgatttattttatttcatttgagatttcagactttgtcgcttgttctttctgtagaagttttttcatagaagtatgttgtttcaaaagcaaccttcaaatagtagacttagcttggatgagaatctaaaagtctttgagtccaacaaccaagcaggtcccctgtccaggaagtaccttatagctgatgtttgagtatccctgcagatgggaactcactacctcctgaagcaccttacttctacccttggaatagtaacagagattaaaatgtccttccttaatttgaggtgaaatctgccttcttgtccattttacacacactaaccttccttccaccatgcaagctgagagagagccaggttgagcctgtgtttccacaacaactcttctcagacctcctgctgccacctaccatgcacttgctcttcactggctaggttccagttgctctgtacctttcctaaagtgtggtgaccagaatttggcacagtgagggaaggttccagagccctttagtgttatcgggggcacagagcttgggctttggagtcgctcagatcttgagttgatatgcacttctttgtccttgagcaaatgattgaaccttcttggactctcagttcctcattaataaaatgaagatgaaacaagatgagatggactgtgcacatttcctgatgggggctggtatgtgctggtgcccagtgcaaagtggctgctggcagaatggtgagtcaccagtacctgctcccttcactgagtgcttcctgtgtgcctggcaccattgctcagggctttacatggacttactcatttcattttcactgcagcctagagcgtaagtaagtatttgctttatccccatcttatagatgaggcatttgattctcaaaaaggtttcatagcttgcccatgttctagcagctagtaaaaggagaagccagagttttcatttaggtgggagtcctcaacctgctttcttaactgctgtgatctgcactgtggcatgagagtttgtcttaatgtaaatgcacatgtaatagcattattcacattgcctgagactgtggaagctcctttggcaaccagatgccacaggggactcatttcatgcttttagaagacttgagccactacatgccctgggaactgtgttgcttccccactggccatcactcttgcttttgtaagggatgtcacattgagccattaagtgtcatctctggaactcatgactctgttattccacatattaggttttctttgtagctttgtgtcaactccaagccaggtaaataaatcttggaagaaccaagttacagatgtgagtaaaagaggggatggcagggggcagaagtcagggcaggccctgtgacttgccaccagcatcctcccttcgggggaggtcctttcatctgggtgctagctggaggaattggcaacgtcggagataaaggtgtagatgcaccagctgaacgtcttgctctgtttcccattttacgtataagatgggtgatggcatgctgcattcagatccccatgggtgtatttgggatttggggtgggggattgtgtgtagaaggcaggaaagattgcccagcaactctcatttgaattgagggtggaagcggttctcgggcacagtatgccaaggcccagggcgtccaagggacagagcagagatcacagatgctgaacgggtggggaaggagcactaggcagggcatttctgatgagactttgatttgggaggtacgaaagttgtatgaggaatcttgataaactgcttagagtgaatggagatgagtaggaatcaccaccattcacatactggctctgcaagccactcagcacagctctgcacctgctcttatggaggagaagacaagcagaagagaatgttctgatctagaagagttcgtgtaagagcatgaaggcaacagcacttgagatgtggtgcacatgagcaaaatttcagtttatgtggaatttaagattaacagattaaaaggtaaaattctctccctggtaccaaaaaaaaaaaaaaaatccatgtactccctctctctcttttttttttgtttttttttttggagatggagtctcgctctgtcccccaggctggagtgcagtggcatgatctcggctcactgcaagctccgcctcccaagttcacgccattctcctgcctcagccttccgagtagctgggactacaggtgcccgccaccacacctggctaatttttttttgtatttttagtagggacggagtattccctctcttgactgatgtttcagcagtatgtggacagattcttttttaaggtaaatgaccaggggcttgtaatatgagtgtcacttaggcaacaggacatttcaatgaaatggtgatggaaataggttctttttgtagattgtgagctcttgggagcatggattttgctaaatatactgatttttaaatttttttgacatctagcatggtgcatttcacataggagtttttcaagaagtactcatttcacaggcatcttgaatgatagatgtttggtaagaactgcgcaagacagtgtactaatcactcattctcattcagcctctcaagctatcatggttggttagtaataacatttcaaaattatatttgtcccttaggctagcagagaatactgtttaacaggtttttcttgaaaagtaggagtagcgagctagagttgtctctaggtggggtaaataaaacatctcccaccccacccaaattgaagctgaataccttcaattcactactgtgcgcatattcatgtttcatgctgagcagttcacttgagactttctcacggaaagaagtgcgatacagttggtggtagtcttatatttgctacgtgctcatgtgttgtctgatgatagaatgcagtggtcaaatattgcacaatttacgccagaggaggagaattcccatcaactctccaaccatcataaatactttattccacacaataaggaaattgaacttttcagaagaatgatatagaacatctaaaataggttaaacttggaggaattatactgtccattgtaaaattggagccactcttgaaaaattgctgcatgccccactgaatgctagagcaagacatgcagtcccagctccaggggcttccagagtgattgaggcagggctgtgggctgctttcctgaagcctgactcctttctttcctcattacactgccacagatggtggcagatacagcatggattggcataagtcactctctactacctgcagaataaaggcccaatttcctagtgcagcttgcaaagtccttctcatctgccaccttcctgcctttgtgatttctcctcctgggactcctgcacccccttttttttttttaatttttcttttcttttttttgagatagggtctccatctgttgcccaggctggagtgtggtggcgcgatcatagcttattgcaggcttgacctcctgggctcatatgatcctcttgccacagcctcccagatagctgggaccacaggcacatgccaccccgcctggctaattttttgtatttttttatagagacgggatttctccatgttgcccaggctggtctcgagctcccgggctcaagcgatctgcccgcctcagcctcctacagtgttgggattacagacgtgagccactgcacccagccactcctgcacccttaccttttcgccgccctggccggctggacgactgcacccatttcacccggcattcttgtgcctgactgtgctctggccatttcctgtgtctggaatacccccattctcccatgctcagccccgtggactgtgtttattcgtaatcacacctcagagcccttccccttctccatggactccacccctgctgtgtagatggccccaacatcattttgctgagtggagtgccactgcaaggcatggcatggaggagcctgactgcataggtggcggcaccttgagggccttacagacctggcagttgaaggtatgggctagaagacagatgattccaaattacggctaagaaataggtaggctgtaaggcttgattgccgtgaatgcctctagaaagagcacttaaaaaaaaaaaaaaaaaagaagggatttccctgttcatggcctatgagtttaaaaacaagcaccccatgtcattagccctttgctcaccacagagttgctgacacattagacgatctagatatgtgtctgagattttggatgcctattgattgtgtattcacttagactttggtgcttttctagatgtttcacaagttaagatgttgttaagaggttctcattgttttattcctatgttctttccttccactcccaactcactccgatgtcactcatctgggttcttctgctcctgcctgggctgcttagtatttattgagctacacactgtgcttggcacccagggccatggaggcaggcaaagaggggggacatttattcagcagcttcttactgagggtatgggtgccaggtgctcgctctgggaaggtgcaaatgaaatggatgatggctgagcctgaagaattcccagggtgaacagatggggggaagccagttcgggcagagggagtggcaaaagctgctgcttaaagtcgttgctcccaccgcgtggggagtaattggatctgtctgcagcactgaggcctggacaggaagatgggactggaatgcagaggggccttgcagggctcagtcggggccaaagggcagagaggcagggcacagagagaagctgtggccgccttggttggtcccatggaatcctcgcccattggggccatgggcattgatcgacactgtggagcttgaaatctcaccaggtggaaacatctctgccagccctgtaatcatttccatagtttcttctggttcttttcatgaacattttccaatatttttatttgagcattaataaaaggtttgcctatatacttaaatttctgccagaaagctttgacttccgtgatctagagcaagcttgtgcaaccacaagcaggtcacatgcagcccaagatggccttgaatgtgacccaacacaaattcgtaagcattcttaaaacattatgagccttttgtgtgatttttttttttttaaactcatcagctgtcattggtgttagtgtattttatgtgtggcccaagacaattcttcttcttccagtgtggcccagggaagccaaaagattggacacccctgatttagagttttaggacttaggttttgggaatgccaaatgtttacatggaaaggctcatccattaggatgagcatggttttcctcatgaactccttggtagaacctaatgttagtgtgtggctcttttcctttattattttcttctgtacagggtactttataaccaatagctgtttctgaaaatatgggaaaactatttttgaatattgaatcaattacattttcagggtagtttgataaaaggcattctgtggtcatctttatctaaaacgaatcctcctggccttagtgtgattattttattttatttattttattttattttattttattttattttattttattttattttattttattttattttattttatttatttgacagagtcttgctctgtcacccaggctggagcgcagtggcgcagtcttggctcgctgcaacctgcacctcccagattcaagcaattctcctgcctcagcctcccgagtagctgggattacaggcatgcaccacaatgcctggctaatttttgtatttttagtagagatggggttttgccatgttggccaggctgatcttgaccttagatgatccacccaccttagcctcccaaagtgctgggattacaggcatgagccaccccacctggccttagtgtgattttgtattttatgttgtgagttttgtttttaaaaaagaacatcagtaagttcagaaaccaactccatgcttatttgctgtaatgaatttttcccttacattggaaaaacacagttccatctgtcctgaaggcccataagtcacagaatgcggtgtgttggaatgtgaaatcctttcagccttgcagaatctttatcattgtgctaaattgccatgtggaagaatggcaggtggcagttagaacttagggctttctatttattctctttctattttgcattagtcagttaaggttctgatcttcagaactttgtatgaaagtcagtgcttcatacaatttcacatcaaactgtggcattgcaagaggcaaaccatttggaattcttccttaaattacaaaaagaaaaaaaaaagtgaatgcacgaagattgttttgttcgcaagacttatgacacagccctccagctctgtggcttttcattctgatgggaaggaaatgagaccattgtaaatgactgttcagaatattagtgccagctccatgccaagtgctgttaagaacatggagagagcattcgagtgtttgcctctgaatttttgcccaggccatagttcgcagttggccggcaggctgcaagggccattccaagtgggagaagcattccatccctgggacaagtaaacagaacctaaaacaaacacatgtttagttgaagtgatacagcaccaggcaaagtgttctacttttaatgagtgaaggacatcagaaacaaaggatcagagccccccacgttgcattctcaactaattatagcactaaggcaggaatccttggccctttatctggagtgagtcagagagtatatcatgccttatctaaagtctaaagttaattgagcccaaggcccttctgaatagacacacactgtaatcagatatacagatggagtgggaagaggtaaatggtttcagatgccagcctggtgtagttgcatgccggaggggacttaaaggaaacagtgagaagtattagaaaactgtagttgaccaggtatggtggcttatgcttataatcccagcactttgggagactgaggctggaggatcgcttgaacccaggagttcaagaccagcctggacaacatagctagaccccatctctacaaaaaataaaaaattagctggatgtggtagtgaacctatagtcccagcaacttgggaggcggatgtgggaggatcgcttgagcctgggaggtcaaggctacagtgagccatgatcacgccattgcactgcagcctgcgcgacagagtgagattctgtctcaaaatagcaacaaaaacaaaaaccaaaagtatagttgcagagaatggctttccctgcttagttttatccagatgactgttagaatagtggtgaagaatctgacaagtggcagaatgcagggccatgggaagggggagagttcatgcctaaggtcagctgagcagaggagacttggagaactgagaggggatccctctcctgtgtttgttgggagggacagagcctgttgcccagcctgcaggtgtgggagggaccctgcaagaagtccctttggtcaccctcttcaggccccacattgcctgatgaggttcagactcctaggcctatgaagggtaataaggcccgtctgttcctgcctttacttttcttctatcagtttctaagcactctcagcctccgggcctttgatcgtggagcgccatgatacagtggcgttgtcctgagtggttagaggtgtgaattctcgaggccgactgcctgggtttgaatccttgcttggccatcttccagctgtgtgaccactctatgcctcagtttcctcatccgtatgataggaatagtggcagtacctatttcatggtgttattgagctgtacagttgctagctgctgccatcatcattgtcatttcctcatttcttttagacccaaactctcacactttccggaattatttctggagccccccagaaggaattggtctcttttattctagattccctaagaggcacagagggatactagggtgagaagatagtggtggctcacagtcatcactctgtacttactagttttgaaaatgtatcaaattgctgacgtctctgagcaccagtttcccaatgtgttaaagaaggatggtgatacccaacccatgtcacagggtttcgtcagtaaatgctaaaccatgtggtaagcagatgttctcagtgagcaccaggtcactattattatgttacttgtcatgacgagttttacttgccaccttgtattatagttgtgatgactatcttttttctagcctcactgggacacatgaaattatagagttaaatgaactcatttgtagatacttgaaaattgtaataatctttgaatatctgtacctgtttgtgtccagattcttctggttattttgacttccttataccccagtgtccttttttttttggagacaagtttttttctcttgcacaggctgaagtgcagtggtgccgtcgtagctcactgcaaccctgaagtcctgggctcaagcaaatcccagtgccttataagcaggcttcctcaaggcctgttgtcttactcatctgtattttccttatagcatctaggtcagtgccttgcttataatgggcatttggcaaatgtttgttgaatgcatttatcattacttagtaataaatactaaactattttttaatgggaaaataggcaggtttgggttctcatgcacatgacccacatttgtcgaatgtctgctgtgtaccagccagcagctttcttcctttagtgctatttcctgttagagtgggatagtggtatttcagtccacctgatgaccatttaggccaatcacatgttaatgggaattgaatgcatgcattaaacacaacaccagcgggtgctgtccacattaaaaccaggaggtctgcttcattggttcttgactatattgaaagagttggaaatctgacctgggcatttgaggtagactctaaggggtgtaagacggccctttgttttagagacttaggattggtgtgagtgactggcagggactgctttagtgcccagacctttagtagcacacacacaatataggaaaactcttcaaggaaaaccagccccaaataagagagtaggtaatgttctgcttctcttgctttatattctgcttgctttacagaataatctgagatagctaataatcaaagttcaggcccccaaaatgaaagtgatcatcatagaaccagaaaagaagggataaaatactgatttcaaggactcctgaagccaatggcagctctgagtttcctggcagccaagacaaagacagaagcatgctgggatgatgcatcctcgggctcggtaaaggaagtacaggacctgcctgctgctgtgggctcagggaaatgagtactattttccctgtctggagtggggaggagcacttgtctgtggtagggtgaggaggaccacttccttgggctatcagtcattaaggccccttaacatcatggccgattctgaaattacctctgaaagttgagatttatgttagactgtagctctcaagccagttcccttagaggccagagtaatgacagtgtaatttacttgccacctgcttgagagagacaattggtggttaagggactttcccaaggtgataaattgttttagcaaacagatccagaggacagctcctttcccctggtctatgtatgccttttgaacgccaagaccttatcctaaactcaagtttcacgaataggattaaaatactctttggggacctttcttacattgagaacagaggctgggccacagcttggctaaagcattccagatctctcttctgagcaagagattttgacttgttcataaaccaggctctctctcatagtgggcaaggccttaaaaacaaacaaacctgcaaaacctgaggaaacatcttcctcctacgtacttagctgatgtaggcattaatggaaatggatattggagtgggaggctccttttagggggcagaaaagaaagaacgtttttatttttaattaaaaaaatattttcttttgagacagggtcttgctctgccatccaggctggagtgcagtggtgcgaatatggctcactgcagccttgacctccttgctcaagtgaccctctagccttggcctcccgagtagctgggatgacaggcgcacaccaccatgtctggctaatttttgtattttttgtagagatgaggtctcactggcttgcccaggctggtttcaaggtcctgggctcaagggatcctccctcctttgccttccaaagtgctgggattataggtgtgagccaccgtgcctggatgaaaaagaaataacttgattatgggttatggaagtttagcaatggcttcaaaaaatgtcagcagggaatggatgtctttttctttcggatgaaatttcagtattcatctgatacagccaaccaggagaaggaaaactactaagtagaaagacttagataagtggagtcgaacatctctgggcttaaaaggagcatcactcctggcatattcagcgtggcccagctgtgtttctctgagggcgatgtcctcctcagggtctgtgaatggctgaactcagaacaaggcttttgcaatctgcgccttctgaatacagtttttgttctgttggtttaatttgcatttggtgtctggagtgcctggtcatggaaagagcccgttctttgttttgggtaatgagggctgaggtttccaataagtatttctcggttccgtccgtgtcgagtgtcatttgagtagcaagtgactgttgctcattgcactgggcctgcgagcctccatttgcacattagatttttgcataccctgcaattagtaaattacagaatgacatcatgaaatagaaaactgtattcccagatggaaatgctttccgtattctatgcatttttattcaaaggcagatgcatttgtaaacctctttggatggttgttctgcccttgtcagttacttcatagcaaatgtcaactgtaaaccaagagagagaatgagccaggatggagaacttttttttgtttaattgtgtcatgttgggtgctttttggaaagtgggtgaattattcatgatgacatgaatgggggtattattttaaattagtatagaagcaaatggttcacaacccatttattaagaccctaatgttgatgtggctaccaagaagctttaccagcaagggccagtgtgttgccttccttggttggttagtttttctacatccacttaactcctagcctaattttatcttttttttcctctgtttttctttccctgaatgtttttttaagctctgataaatcattttgaattaaggtcgggtatgtatttcctttcttctcatcttcttccccctccatgactgcctgcatttgaatacatttccattgtgtgagaggcagtaatggtacagaggggtggggggtggtgactgcttggtgagctgtggctcacatgtctccagagacacagggcctaggaagactgattaaaaatcaacttttaactactataacggctcactttcctgaaacttgttatgctgtaaccccacctattgaagacataatcagaaccagaaagtgaacaaaattgaccctggaaatatgtggcaaaaattctgtgcaataagtatgataacacttttctttcagtgaattctctctcagggcccactcacagaaccaattttgacatcaaattttcttccttttaaaaatacagttaacccccacccccatctgcaggttctccctctgcagattcaaccaactgcagattgaagatattcagaaatttagaaaaatgaaaaataacaatataacaaaaagtaatgcaaataacgcagtatcacatctatttatgtagcacttgtgttgtattaggtattatatgtaatctagagatgatttaaagtatatgagagggtgtgtgtaggttatatgcaaatcctataccattttatgtcagagacttgaggatctgtgaattttagtatcctcaggtgtcctggaactactccaccatcaatgctgagggacaactgtatataatataaaataaataaaatatgtactgtaaaattgtaatcttgaaagtttgatcctgtggcagctgctattttcaggcagctcagcctttgtttgcatgctcaaaaccagcttgtgatttggtttctaagatcacggctggcttattatctgtgctggcttatcatgacagtggctcggtgttatggacacagtgagcatttggtgtcgatactcccagaatgaactgagtagaatggacaggagactgacctttgtctatttgtctatgtagcagtaatgccactaacttgttgcagtgctctttatcctcaaactatttgctatatatagtaatgcttaaattacatatattatatatattacatatacatattatatatgtggatatattatatattatatataatatatataattatatattatatagatgattctgactttgcacagttctgatatgcatgagttgcaattaccatgatttaaataataccagttccccaacaactctagtcaaatctcagttacccccgtgtgttaattgagtaattgcatgaagtacacaagcttgctgctagtgcttcagtatacaactcaccatgtaaataacagatgcatgtcagaatccgtggccaatcacagcacttctttcaaagcccatgggtgattggtcagtgcacatgttccttagttcatgcacagacagcagagtgtgtagttctgtggccttcttggctattggggataaaccagtgtgacattttacaaaaataccaaaaatcgagagggaattggtgaacgaagataaaagtgcagcaaagaagctgaaagtgataatgctagaagtgaaaccaaaacctacatggaattatagaagaaatagctgactgtgggaatattggcagtacagctgttggagagactgcctgcgcagcccgaggaggagaatgcaggtttaccacataaacaaggaaagtggttgtgaagaaaagaataaagctgtcctagaggacatgaccttggcaaaacaaacaaatttcacattaaaggatctctcagaaccatttcccagcatagaaaatgcaaaggatgaaatgtatgcttattcaaacttacggctcctagcagcactgttcacaatagtggaaaggtagaaacagcccagttatccatcagtgggtgaatagattaacaaatggatgaatagattaaaaaacagattgtggtatatccacgcactggaatattgatttaaaaagggacgaagtactgatacctgctacaatgcggatgaacctgaaagataccatgctaagcgaaagaagccagatacaaaggtcacatatgataaggttctatttatatgaacgatcttggtaaatctgtagagaaagaacacagatttgtggtttggtttctaagatcacagcaagcttatctctaagatcggggctggggcgcggtagggaaatgaggaacaactgcttaatggatgtggagattccttctggggcgacagaaaatgttttgcaaccacgcggacgtggtggttgtatgacattgtgaatgtactaaatgcgcttaattgtttactttaaaatggtgatgttatatgaatttcacctcgattttaaaaatgtgacatttcaccaagtcatagaaaagatgcttcgcttgtataagttatgcaacaaaaagataagcacttttaaacatttcttgataagttttttgtttccagggttttaaatggcaatgtgctgaatatttcactatttttcacttccttgtacatttataactgacagtaatagagtttttaatgctttgacaaaatttttaagaagtcacagaacaattgcattttttccttttcatcactaacattgttttgcaccgtttcagcttctatggacattcttatggtttcatactgagtactgcctgtgcacatgtatttcactacacccccgccccccaaccaacccctccaccccccaaacacatcccatacccattacagcacgttgttgcagggaggattctgagatgcgtcttctacaatagaaaaagatgtgctgggcttgctgtgaaaaagcagaggaagttagaggtgggatattagcggtgaagttggtagaacctcagctgcttctagggaagagggaaggtaaagtcagcaggtattagggaccaggggaagcctgtaacttataaggtatggtaactatcagagcagtttgtgggattggctagcagctgtgtggccagtagctggaagaaccagtggtctggacatgtcctagttttgggaaatctgtcggcaaggagagcgctaggactgaaggtacgatgcctgaagcccagaaacgcataatgggctgtgacaatgctgtttcacttgagctcatcggatgctttcgaggattcaattcatatctccctgttctccctgcattttgacacaggccgtgcttgcatggcagttgggttagtgtattcccctctccaccagagacttgggagggtaggggagtgtgccttagtcattcttgagactcctgtgcctggcagtgcctagcaacggcttaataaatacttgctaatgaacctaattattatgacattaagattttaatctaaatcttctaaatgactatgggaatctgtttatttttgcttaggatcattggtaatgttttctggccaaagctgcttttttgtctgagctgtgtgtttatttttcattcccgtctcttatttatattgtgaaaatgattaagaaaaataggtggtatggctcatggtctgatatcacgagtcaatgtgttgttttgaagccaactccacacataatggttcaagccctctgactacatcttagttttactccagattttctccatcaatgttgcttgcatttttcagtggtactttttggaaggaaagaatacgaaagccagcccgcaaaagatcactgggtgggggtcatagtctgtgatggtgactgaattatctggtaaagcatatttttgccgttttcagggtcaggcttcagcataatgagattccagaaattgttatgaaaaaagaaaccttaggttacccagcagctaaatgattactgcatcagctagcagctccggaatggccatttggccctgtagaaagatcattcttgggcaggctgttgatgtggagagtgagaggagcagctgttctttcacctgaggccccatctgggtagcagatggtccccagctaggcacaagccctgtgtagggacatccgtgctgcccaggatcctgggacactgcccaaatcaactgttaggctgggagcctgtgtccagaactgtggatggcattcactttgggttgtggaagttggtttgtacctactcttaagtcttgccccttcaactccagctcaggctttttaaccctagtagaagctttcttatctgtaggtatttaagataagtttgaacctactggtctgtgggaaggtaccgaaaaagccaaaagctgcagctcctggggagcttacaggctcccccttgttgagagtctcccgagtgctaggtactgtgggtttaagggagaccctgcagtggtcaaaaggctgcctggtgaaggggggccggttcccatacttctcagatgtgcctttgggcaagccacttgcctcctggtgcttctcttttgtcatctgttaaaggggttagtgaaggacccttctcatagggttgttatgaagattaaatgatttaaagtatgcagagtgctaagaacagtgcctggcagatgattaaaaaaattgttacagaaatacagtacaataacatttttggtcacatttaatcctcaaagcaatcatgcagaaagggcaattgtcatacctattttgcatgagagactcaaccactcgcccaaagtcacagtgctagaaaggacttgagccaggatctgaacctgtcccctgaaatcttcacctgctttgcttcttgacacgggcaggagaatgatgaggaagtgggttagtctgctagggctgctgtaacaactgcagatggggtggccaaaacctcagacatttatttatttttttaatataatcttggatgttggaagtcgaagatcaaagtgttgacaggcgtgggttcttctgagacatccctccttggcttgcaattggtcaccttcttgcttcttcacatggtcctccttctgtgtgtgactgtgtccaaatttcctttctgtaaggacacagccatattggattaggcccaccctattgacctcatcttaacttatttactcctttaaaaaccctgactccttatacagtcacactccgaggtactggggattaggatttcaatgtatgaattttggaggtgagaggacacaattcagccaataccagtaaatgattagtaatcaaacacagggattgaatacgcagatattaaggattggaatgaagccagaatttggaaggattagaactgatggaggcaggtgcttggtctgggtgatttttgaaaatgattttcaggccaggtgaggtggctgattcctgtaatcccagcacttttggaggccgaggctggcagatcacttgaggccaggagtttgagaccagtctgggtaacatggcaaaaccctgtctctacaaaaattacaaaatatcagccagaagtggtggcttgtgcctgtaggcccagctcctctggaggctgaggtgggaggatcactggagcctgggaagtcaagtctgcagtgagcaaagatctgtgcctctgcaccccaagctggacaacagagcaagaccctgtctccagaaaaaaaaaaaaaggctttcaacagagtcagtcgtggacaaagaggaagggacttttttcctcccctgcagctttaacctcccaggctcatatgatcctcccattccggcctcccaagtatttgggactacaggtacgcatgccactatgcccagctgattttttttttgtatttttagtaaagatggggttttgccatcttgcttctgctggtcgtgaactcctgggctcaagcaatcctcctgccttagcctcccaaagtactgggattacaggcatgagccactgcacccagctggaaaggactttttgtgcggtgagaggaggatcctcagaatacggagatctggggtccgcagacccattgtgggatgcacattgatttagtcagatcttgagtgaagagatactgtgttagctgactgcgtgataaacgttagcctgagaaattagtttgttattttgataggcatttgagtcatttattgaactaaaagctttggggtgcctcatgtactaggcacgaaatcacagtacagttcttatcaggggagagatcatttgggtctcagtttcctaaaagtagcttttaactccaaaattgttttaatctatgtttgtagaggaacatcatgaaaatattttgaaattaaacttcttaagtataccttaattttatactgttattattttatttcatttttatgtttattttttgagacaagtttcactgtgtcgcccaggctggagtgcagtggtgcgatctcagctcactgcaacctccgcctcctgggttcaagtgattctcgtgtctcagcctcccgagtagctgggattttaggcatccgccaccacgcccagctaatttttgtatttttagtagagacagggtttcatcatgttggccaggctggtctcaaactcctgagctcaggtgatccacccacctcggccccccgaagtgttgcgattacaggcatgagccaccgtgcccagcctactgttattattttaattagtaaattttggtataatagagactggattttgacttaaggctatctgggtttaaatcctggctctgtcacttaatagctttgtcagatataccatatgacataaataggcagagtttccatcttatcacctgtgaaaagtggataactgtacacatcacattggattgccacatgcagtaatggatgtggaggttctgtccagcattgtgtctttcccatgataggcacttgtgctaatgctatgcaagaaggtagaaagttgaaagtggatagctaaaagtggaggcaaattaagggacttcttaaaatatttttatttaatagaaaacaatatatagcaagaaaatttggatcaattctttcatgcattcaacaattgaagtctgagaaccagccgtgattaggtgctccaaattagaataaggcaaggctcctgccctcattgagcttccaggcaggcgggaagcccaggagggcgtgataagtgctacaattcaggtgtgttcaggttgtcatgcaggtattgaagagggctacttttggatttatgcccgcagaagagtttcacagtttctgaatttttgccccaggatgggagcaggcacttgcattaacatttgaattaatcacccagagaagagtggaaaagttatttcaggcaatggtaacagcatgtgcagaagtctagagggatgggagaggccacatggcatggttggaaaatagcagctcaggaatccatttgctgtgggggtggtaagtggaggactagatttgtgaaaggggacagatcacacaggctttgggaacaactaggaggtttttttttgttttttttttttttttttgagacggagtctcactccatcacccaggctggagtgcagtggcatgatctcggctcactcaacctctgcctcctgggtacaagcaaccctcctgcctcagcctcccaagtagctgggattacaggtgccccccaccacacctggctaattttgtatttttagtagagacggggtttcgccatgttggccaggctggtctctaactcctgacctcgtgacccacctgccttggcctcccaaagtgctaggattacaggcatgagccaccaaacccggctgactaggagatttttaagcagggaagcaatttgatgatatttacagttttaggaagaccaaactgacagcagcttggaggctgatttggaaaggaggcagagtggaaggcagggttgttgaggggggatgttttagaaagattttgtgatgattctgctgagactgaggttctgaacttgggctgccctacagcagcccaggaggacagattgcagagctttgagatagttggcatcaagatgggtgtgtctggggtgggcatgactgggtttctagcttgggtgtccaagtggataaatagcctttcatgtggaggctgagggcatgggcaggttgagtactgtccttcttccccaaaggtagctggccagccatgggagtcaatccacatgggatggaaggatggagaatgccagctcctctttaaagacttggccctgaagaatagagcttgcaattttgtatctagggtagtcattaagatccgttcacacaggtttggatctttaatctccagaatagagggtgggatgctccctgctccattgagcccaggtcatcatgtgacaacctgtgactaattaggcagtgagctgatgagattcgtgtggctcttgagctaagcttttgaagccagggtgagactctctggccctcattatctcagctgtggtgcttggcatgtcccagaaggtagccgtgctgtggacctcagtccccgagggagcgctgtgccacctccacccacgatggacctgccctgagagagaagcctttgttttaggctctttaagatgacatggggattttggtggtgtttttctagcctaatctagcccttcctgactcaagtttttgtgtaagagaccaaaccttgctcattttcttttccttagctacaaatcagttttgaacttaccctttttcagtatatgcctgtgcatgtgtatgcctttgtgcgcaggcagacaaatatagctaggaccaaaagcatttctgctgttaccattatccttttgtccaaggtatttttcaatgaactaaatgtcagaaacacacacgctttcttaaaaaagcagctttattgagatatgattcacataccttacaattcacccatttacagtgtataattcaattacttttattatattcaacgttgtgcaaccatcattatgatgttaatttttttgtttgttcctcttgttgagacagagtctcactgtcgcccaggctggagtggagtggcacaatctcggcttactgcaacctctgcctcctgcgttcaagcaattctcctggctcagcctcccaggtagctaggactacaagctcatgccactacacccagctagtttttgtatttttagtagagacagggtttcatcatattggtcaggctggtcttgaactcctgacctcaggtgatccacctgccttggcctcccaaagtgctgggattacaggtgtgagccactgtgcctggctgatgttaatatttttattacccataggaagcctgtacgatataaccatcaccccccagttctcccacacatccctctccccatccctaggcagcctctaaactactttgtatctctacattttgcctattctggacatttcatataaactgagtcatgccatgtatggttgtttgtgactggcttctttcaattagtggagtgttttccagggtcatcaatgttatagcaggtatcagcacttcattcctttttattggtcaaatactagtctgttgtatgggatacattgtgttataaaaccatatggtttctagagatggaagccatgctgacccctgtagagttttgtttatccatttatcagttgatgaacatttggattgtttctgctttttgcttctatgaacctctatgtagtacattcttgtacaggttttggatgaatatgttttcatttctcttgggtttatacctaggaatggaacttccagactgttttccaaagcagctcaccatttgacattcccccccagcagtgtctgagggttccagtgtatctgcatcctcaacaacacgtgttgtctgtccagtgatagccatcctactgggtgtccctgttgttttatgtcatttaacaccaaacttagatcacatttctgcattactgactttgcacataccgtccccaacttgcaacttatgctgtcattaacttgtgtagatttatccatgtttggctgtttatgaggatttgtccgtgtcaacatgtatgtttcataaggacattcttaccttccattaccagacctacattctcaatttaagatttgatattttttcagtgtttaggttttcaattgaatcaactgacaagtttagtggcttaaactttcaagcttaaactgaaatgccaatcttgttttagaccaaaaattacatcctatctcttctcttaattgaggaacttaggtggtggttcctatttgtctttatttatttatttatttatttatttatttttgcctacttcagtttggtcggtaaactatcaattgtattttcagtatgtatatatatagagagagagatttttaaaattttattattattttttgagacagagtctcactctgatgcctaggctggagtgcagtggtgtgatcttggttcactgcaacctccacctcctgggttcaagtgattctcttgcctctgcctcccaagtagctgggattacaggcatgtgccaccatgcccagctgattttttgtatttttagtagagatggggtttctccatgttggccaggctcatctcgagctcctgagcttaggtgatctgcctgccttggcctcccaaagtgctgggattacaggcatgagccaccatgcctggcccattatatatacatttttaatataatgtgaaatcatgtggtctctactatagactgaatatttgcatcctaaaccccaatgggatggtattaggaggtggggcctttgggacgtgattaggtcctgagggtagagccctcatgaatgggattagtgcccttataagaagaggccaagtgagcttgtttgctccttctaccatgtgaggatacagcaaagaacgtgctttctgtgaaccaggaagtggccctagtcagacactgaatttgccagcaccttgatcttggacttcccagcctccaaacctgtgagaaataagtttcggttatttataaaccacgcagtctgtgatagtttgttagaggaacccaaacttaaaggcagcttctaaaggggagcaatgctgaccactctgtagtttgtatatttggtcaacacactttattgagtgatgagtctgaatttcatgcttgattgatgatgattggtgacagagtagacaaggtccctgcttcatggagtctatggtctagttggggaaatatacctttattgaatcaaggcagatgtgattacagattgaacaatggctgtagaaggaaagggatttccaagagagaattagaggggcttctcaaattgagtttgactttctctttggtgggggttgagtcaggaagaacctttttgaagcaggaaaaatctttagctgagacctaaaggaaggggaggagcttgcctgggaaggacactgtggtggctggagggggtttcccaggcagggacactctggcaggttagagtaactgaaataaagtctgtattggagtgcagagactgccagaagaggggctcatagaggccaaagtgggacggccttacggacgagctgataatttgggcattattcaaggtggggtgctatgtcattgaagggttttagcagaggggaggcattatccaagttaaagaacaaaacaaaacaaaacccactctagttgctgtgtggcagatggattgggattgggggtgtggggttggtggcaagaatagatgcagggggacaagttatgaactgagactgggacctcatgggtcttcctgcccaagaccgagatggctgggggtgggggctgcagctagggacatggggcctcagtgcccacgttttctgtcctctgtcccctgtgagggtatgtgcgctctcataccagccgccgggcactttggctcgcttgtgttgctgggagagatctcctttaatgtttttttgtgtttttaaaatatgaacgtaggccctggcagagacaaggcagaaaccacttttgagtttttagggccgtgcattcttaaacaactctgagtgacccttccatcattacaatttatcaactaaattagaaaacgtgctttcacagatttctagtacttgggcaaatttgttatttacgctcaagatgaagtgttgcttctagtgacagttttgctgttgggcagcatttgtagggtaaaggtgtttttgcttttggaatccattgggagatttaaaaaaaaaatatatatatatacacacacacacacacacacatacacacatataaagtaaaaagcaggaagtctatgtgtgtgccaggggatcccaaactcttggcctccagcagtcaagagattttttaaaacctttatcttttaccgtcttgctttttaaaatccattatgtctttgtatagtacttgacatacatgggcagaagtcatgctggaacgtgaagatgggagcatggactttctggagcatcccaggtggggttcctgtggctgctgtaaggcaggaccgcagagcggtggctgcagacagcacggatttgctattatatctcatagtcctgtagggtagagtctaacatgggctaaactcaaggtgtcgccagggctgtgttcctcccggaggctctaggagaggatccccttgcctttcccagtttctgcaggacatctagcagcctcagctcattgtcccctccctgcgtttgcaaagccagcagagtagcatctctgtggccattcccacatggtcacatctcctcctgggatgctctccttctgcctccctttgcactttcaggagcccttgtgattccattgtgtccatctggataatccaggataatctccctattttaaggtctgctgattagcaactttaattccatctgcagccttaatcccccttttctgtgtaagctgacctagtcacaggttctggggattaggactcgcgcatcttgggggaccgtcattccacctgcggcagtggtaggctaaaccttaggcgtctgatattgtgaacctggctcactggcctttgtcttcttgccgactcctattggtatttgcctgagatgtttttcttttctttttcattcttttttcttttctttctttctttcttttttttttttttttctggttctgggcccacagtaggtgccttagaatcatgcagtccagttgccttctgggaatccattgtagtaagtggtagaggtttttaaagcagtcctaggggagatgcaattccctgcttacattcaagtttttcgggaagacaagtctgtttaggaaacataggaggttagttgcattttcctcattaatgcaggatattaaaatattcagagggaacccaggagtcctctcaagatgagtttaaatttctcatacttgtagaagttgttgagaaacactggattctaatttccagaactctggtggggaaggagactgtgaacctggtctgaattgagaatggggattgaggatttttggacttttgaaagattgacttactctctcccgttagttctgttgaactgctgcctaaatggagggaatgtgcatcctgtcttgtgttgtgtggcaatgcagtggggacacttgggacatgagcaaaacgttgacagaggggagcacttcctggaatattattaatacagagttagttttaacttcaccttttgggcaaacttgacattatagatcttgaaataggattatttttcccttgctaagaggttagcaaaatcagtacagtgtgtctctttgacaggccctagaaagcactctacgtttgttaactttaaatttgggtcggaaattgatgttattggaggagcaaggcgtgtttaggcctgatgatttttggatagcttgaccaaacccggtacagccaactttcccccaaaactactgtgtccttctcagtggttcctgtgcctgcacagggacccagcgcacaccccagtgtgcctctttgggctctggctaacttaggctgacatcctgatagaacgcagtgaccacctggtcatttgattacagcgcttcttccagacagcacgctcagaattgcgtttcttacttccagtcttcttgccctgtaagcattttctgtgagtcaccaaatcaaacacaaaatcatataattttatggaagtggaaaatcagacttattaaaatactgtgtttttgttttaaagctcagaggtatagagatccatgaatttttttccatgccttctcataatgtggttttggtttagctgcggttcttccaggcgcagatgtcagccctctgcagatctgctgcatcagaatttatggcctgggtcttaggaatttgcaatttaaaataaccccttcaggtgcgtctaatgcagcctaaatttggggccagctcatgggttgtaaactgtactgccctatacaatagtagcacagttctaggctcaagggactcaagggggtccagtaagtacagttcaccagagaaataacaaaagcattagcagagggagaccagagcatcatctttgttagggcaaaggcttaacatagaggaatgtggcttctatgtccaggccagtgggcttcctaacacagaacatggaattaggcagacttaacatcccccatgcccaccccggtgagtgccagcatgggcttgagctgctcttcacactgatggtccatcctttggactgatctccttgtgaaggatacaatacagcaaggagcgggggcttggcttggcacagccagttctttacccaaactcctgccaacgctggcccttctttcttaccctggttggagtgtgtgagggtgggagaggcaggaggaatatgctggacagagcttcttccatctagaagggaatttcaggagtaagaaagcagcagctcttaacatacctgggagaaagcaagtgcttagtaaacagttgaggaatgaactaagaattttcagacagattttcctcttctggagcatttgcagaaccgcctctttgctcaagtgctttgttttttacagattcatttaaggtcatggttccagacactaatgtaaatcagcacatatattattgaagaagtagaatacctccaggcccagttgccttggagcaggaaaaacagttcatcctcattaccatccagaataatttatgttcaagataatacacaatcaatttactttttatcatattcaaatttgatttgtgtacacttttgagtttggatgtcagccacattgcttctgtgtgttaatctttatttacgggaataaatgggaagcagtcagccattttttattctttattggggaactgcattatagtggaaaaggtaaaattataagctaatgagaccagaggtctgtatgtatgaaaaccgtcctcatcgcttcacagttgtctttgaaccagtttccctgggattgttcgaaatgtagcaaacgtggctcacggttaccctgacggggccagagcaatagggggaggtgtgggcacctgtatacatttgcgttgaaaaacgtacccgggctattctgaggtcctttcctgcccccagcctggtttctgggcctctctggagtctctctttctggcacttgtgttctggaatcgcttatcagcctggactccttcagcagcagctgccacagtgtctttgtagtcacactacacacctatatactccatgacatggagcgtatagaatgtttcccgtcttcctcgtcagtgctgccaggagaagcttcccctctcctaacctctggatagtggctggctctgctttattcaggcattgctttcattttttagaacagctgctccagtatgcttagtgtgaatgacagcccagcagaaagaatggacttgacactggacactgcaccactccacatttctttgtcccctcaagatgacttaactagctcccttcccttttccttcatgcaatagcctcagaagttcggctggcattgccaagttgttagagtgaaccttaacctgtgtatgactcagaattcacatctgctgtgtcagtgaacacacagatctctttgtgaacacatggttatcaagaggcacatgctcttacgtatcctgccggattctggtaaggcgctgcttgcgcagtaagcacttgtcaggtgcttatgatgcctgtgacgtgaggctgtggatgcagaatttgtggtctgaacatttttgagtagataaaaatggaaactgaaattggtgaagcagacttgtggcttttcctattttctcatctcttttatggatataactagaagctctgcttcatcaatgagtgtgttaaaacaatttgtttacaaaatcctatttattaaaataaaaatctgaaagaactgcgctgctgcttttcagtgctcgccactctaggaacctgtattcctcctcttgttcatcctcccttttcttcttttttgttttgttgttgtttgtgtgtatgtatgtgtctgtgtgtgtgtggcggggtggtgggggcggtgttgccaaatcttttgcactgaatctttgaagatgtcctgaaatacttaccaaatcactagagcgaagagaagcccatctgatttcttcatctcccagctgaggaaggacacactttctcccactctccagtgaaggcccctgtgtcctgtgggtgggggagctgacatcacactcagtgctgacatttcttgttccctgggtgggcgctgattccagatcctcttcagccccccaagcggaactgggtttctcttgaaggtcctaacctcagctcacaccacctgctactacctttctgggtcttggattttgttgttacccaggcccggggtcatcccaaaggctcttgatagccctgtggctgtgcttgctaatacactgtcctcatcttttgtcagcgaagtaaatccaataatgtttccttctctttaatccaagccagtcttcattgaaaacacttcacctctaagctctcaggctctgcagtctgccctctccaaccttacccctcatgccccaccttccctttgtccccatctttcccttctgttccagtcattctcatgggccatggagagtggaagcctgggagggctttgccaaagtccagttgcctgctcactttcctaagggccagagcaatgggggaggtgggggaggtgtgggcatctgtatacatttgtgttgaaaaaggtacccaggctattctgaggtccttttctgcccccagcctggtttctgggcctccctggagtctctctttctggcatttgtgttctggaatcgcttatcagcctggactccttcatcagcagctgccacagtgtctttgcagtcacactacacacctttaccccgatccactgacctgctgtcccggatggccctggtgtgttctctctgttcctagccgcagaaattgctggtgaatgtcaccaagctaagcggtgtagctttataacaagtggattcagccagctggggctggacgactgagagtttgcagcccctgctggaccctgtgtaactgtccagtttgcctagctattggtttggcccagtggttttcaattttggctgcacatcagaatcacctgggggaggtttaaaaccctacctctgcccccatgccctggggttcacacccagaaatgctgacttcattggtcgggggctggcaggcctggacattggcggtttgcttagaagctgcctgggtggttctcatagcagccagggtcaagcaccacggcctgttcttacctggctccccaggccccctttaatctccctctgcagcagattggcacacatcgcattgtggagcaagccatctgataattttccttaatcgtctttgaagatcttccctctgcctgttgatcctttaaggaagaagtctccttgccaggatcggcctctccagtctctggatcccttcttgcttgctctcttcagaacccatgaaacctctctggctgccttgacgtcagccagattggactgcccaaatagaaaggcagaaatccctgtcgaggccagacagcaaggatggagaggggcagggggtgaaatgaaacgcaccaggaggagtaaagacaaggccttctgatgtcagccaagagcaggtgtggattaggcagtcctaagtttgagtcctggttctgctattcattggccaattgtattctccctccctctacgatgaggttaattacagttacctcactgggatttgtgaggatggaatgaggtaacaaaacataaaatactatcagtacaatgcccagctcataatgagtatgcagcaaatgttcaccctttaaaaaatgccacggccgggcgtggtggctcgcgcctgtaatcccagcacgttgggaggctgaggcgggcggatcacgaggtcaggagatcgagaccatcctggctaacacagtgaaaccccgtctctactaaaaatacaaaaaaattagccaggcgtggtggcgggagcctgtagtcccagctactcgggaggttgaggcaggagaatggcatgaacccgggaggcggagcttgcggtgagccgagatcacgccactgcactccaacctgggtgacagagcaagactccatctcaaaaaaaagaaaaaaagtccctttctaccttcaaattcaggaaaattttctttagtccaacagatgtaatccccccctcactcccccatccccactggtatctttatgtactcaggtgactattaccatattctgcttggactgtttttatacattgcagataatttgaagatatggatttaggtaggtttttagatttataataattaagtgatgtttttctatcaagtgatgaaagtttcaacagatatttgttaaaatttaatttagccaaaggaagacatgccatttcagcaatgtgatctaagtaaaagtgtcttctcttttttttggtggggagaacagagtgtagaatgatattagtaagatagagaattgatgaccaaaccataactgctagcattttagtagaggacacaacagagaaaggattctcacgtgtgttattaggatcttggatgagagtgggctgttattttaactttggcccctgttggagcaaattactctttgggggcccggttttcctcaggaactacctacagaattcagtgagatagattttagaacccttctgaatgctgctggtttggagattctgtctgtagcaagttttgttcagttgttaatctttctttcttttctttcattctttttttttttgacagggtctctctatcacccaggctggagcagtggtgtggccctggctcactgcaggctcaagcgctccttccacttcaactgcccaagtagttagaaccacaggcgagttccactacagctggctaattaacaaaaattttttttgtagagatgaggtctcactgtgttgcccaggctggtctcaaactcctgggctcaagtcatcatcctgtgttggctttcgaaagtgctgggattgcaggcatgagccaccacacctggccaactatatgttttctatgtttattatattttctgatttgtaatgtattttaaaattatcccaataatatatgaatgcaatcttgaaaaatactcagcatagcctttaggctaaaaagtggaggtctgccatttctctgccttgccccattcccttcccatgtcttattttccctgttaccaggttggtgtgaagcctttgagacctttttctctgcacacccatatatgtgttttttctatgtttttatagtattgtttcatttaaaaaataaactaggtttttgaacttgagaaatttcaactcgttctgctcagagctttgttttattaaaatcagtgcctgggagttgctcaagtctttgggctgtgtcgccctctagtggtagccctttggcttacagctgccattcagccctagggctggggtggaagtgatggttttgtgcccacaacctgatggcagggttggcagtgtttagttgctgacaagtgtctaaaactcaatctaggccgggtgctgtggctcacgcctgtaatcccagcactttgggaggccaaggcgggtggatcacctgaggtcaggagttcgagaccagtctggccaacacggtgaaaccccgtctctactaaaaatacaaaaattagccgggtgtggtggcgggcgcctgtaattccagctactcaggaggctgaggcaggagaatagcttgaacccaggaggaggttccagtgagccgaaattgcgccattgcactccagcctgggcaacaagagcaaaattctgtctaaaataaaataaaataaaataaaatataaaagtctggtgagccctggagtggtgtttgccttgctacctccaacttgccctttttaagagacttaaaatttgtggtaacttttcacatgatgtgtatttagatactgctgagttaatgaggctgctatacctggctgatttattgtttgctttcaaagcagttgtcaagtggtgtccacccatcccactgatggattttttttcttttttctttttcttttttttttgagacagagtcttgctctgttgcccagactggagtgcaatggcatgatctcggctcactgcagtgtctgcctcccaagttcaagcaattctcctgcctcagccccctgagtagggattacaggtgtgtgccaccacgcctggctcatttttgtatttttagcagagatggagtttcaccatgatggccaggctagtctcgaactcctgacctcaagtgatccacccacttcagccccccagagtgctgggattacaggtgtgagccactgcacctggccccactgactgtttatatctgttatactgttcttgcctctgtgccttttgggttccctgtcatggcagcatccttacatcctccaccacctctgaatgttcccgcaccttctctttctaatggaagcctggctggcccttgaagacaccgccaaccctgctggtctcttcacagagtatccacccagcaacctggcctgtccattcttgacttcttctggtccagctgcctttctgtacctcattttagtgaccctttttagatctcgtccaggttagcctctagaaccctgatctcaggcaccccactctgcgatcttccgttcccagccttcccacttgaaatcgtcttggaaatcccgggctttgccaatctgtggacccaccaccttttcaccccctttccggtgccctcaggggactttgctgtagcctgaacctcatggtcccttcctgtaaacagccaaactgctttgtactccctgaggagacccccgccccggttggacaccccaccctggttaaacccactttcacaattattccaaaactgccaactggacttgcatctcttcagatcggctgtcatcactcattgtatcaggaatcttattacacttttgcagcagtttcatcggttcagagaaaactctttcataccttctgctcatcagttctccacacctcccatcattctcctagctgatgactttgctgcttgtctcattgaggaaagaagccgttcagtcagtgagaccccctgtctcgcctccacctttccacctgctgccgcggaggcttccccagctcctgtctcactcaggccccttgccactctcaaggcatcttcttcctgcttcccaaggatgtcactcctgcagttaaccctttttcctcctgcattattcgtttcttcctttcttccgcatccttccaaatagcgtaaaaacaggccttatgacgtttctctttaaaaatgtccttaccagtgccacgtccctcttggccactgcccctgttgtgcctcactccgtagaaagaagtgacctgtagagactatatcctgccctctccagcgcctgccttccgattgccccttccagtctagtaactgtgtccattccttctccaatgaccgggtgacaagctgtcccttctgagagtgccagagggtgttccccgggtgggaggccggatgtcagtgccagctgtgctgtcctgggtgagcctgtgagggaccacatctggtcagactcgtgcatggcctgccctcatcttcctccgcctgcggtgcctttgagagcattgactccactaagcccgatttctgtgtggcatgttgtctgttcctccccggcctcctcgatggctcctccttggtctccctctggctactcctctgcttctccgcctccaagtgctgctccaagtgccttctgtgctctgtctccatccagcccaaaccttccaacactctctgtaagtggaatctcaccttgaggctgccagcccagcctcctcacctctgtgctccatctttagagagtcacctctctgtctggcattcccacttgaggaccaagatgattctcaaccttaacgtggcccacatggagccgctgctcttcctgcccagatctgccttcaccaccacatcctgcccactgtcactaaacggcaccagctcttacctggtttctcagtaaaaaaacaagtttatcatcttccctcacatactttattcaataataatcactaacatttattgagtgcttcctatgtgcctgacaccattctaagcatttgaagaagagtgtattaacctgcatgagaaaggctattaaaacctatgtaattaattaattaatggatggatgtgtggatgaatgaatggcagggtcttacactgtcacccaagctggagtgcagtggtccaatcatagctcactgcagcgtcagactcctgggttcaggcagtcctcccacctcacccttttgagtagctgggactacaggtgcttgccaccagctaatttattaaaaaacattttgagagatggggtttcatgatgttgccaaagctggtctcgaactcatggcctcaagcgatcctcccactttgacttatagattgtggggattagaggtgtgaggcatcgcgcctggcctgtaataacctatttgtgaatgagaaaggtcaggcacagagaagttaaataatttgctcacagaaatttcctgtgttgcagctgagatttaaatccaagcaatgtgtttctaagcctgggctcttaactgtaacactgtcctcttccccccaccaggagggtgtgtgtgtgtgtgtgtgtgtgtgtgtttctgaatctgaccagttgaggcaggctttcatgtcattctctctggccacccccttctttgttcacctccagtctttggaatagtcagagcgatgtgttcatggtagaaatgaaatcacatcaggtcctcagtggcccatcacatttagaactaaagctcacccttgcctcatgcctctgagcccttatatgatctcgagtcaccaccccactgccagcctctccactctcttctctgtgcctcatgcagcccaggaaatataatttggaccgcaaatgccagccacctatgtacggtaacttttctagtagtcacattaaaaagaaaacaggtgaaatgaattttaatgcattttagttaactcatgatatcaaaaatatttcaacatgtaatcagtattcacacaaagattaatcaagtatttaacagtcttttcttttgatccggggtcttggaagtttgacttaccacctctcaatttagccagccacatctccagtacttggcagctgtttgtggctacctcatggacagggcaggtcccgccacccgggcatccgtctgcctggcgcacgcaccaaacgggttccagtctggggaagttggcatctgctgttgttacttttggtcagaacgcccttcgcctgcgtcctcacggggctgactccctttagccttgaaggggaccgttgctccgagaggcctgaacactccagctgcagctttctccccagtcattattgagatcaaattcacatctcttacaattcacccatttaatgggtgatgcaatgcggtggcttttagtatattcacacacatgtgcagacatcaccatagccaattttagaaaattttcatcagctgaaagagaaaccttgtatcctttagctatgactttgtgattccctgttcccctgagcccctggagaaccctatctttctgtctctgtaggtgtgctgattctgaatattttgcataaacggaatcatactagggggtcttttgcttgggacccctttcacgtggcgtgtttccacggcccatcccgtgtgatagcatgcatcagtacttcattcctttttatggcagataatagcccattgtatggatataccacctgtttttttaaaaagtccattcatcaattcatgagcatttggtttgtttctactttttggtagaatgatgctgccatgaacacttgtgtgcaggtttttgtgtggacatagacttaggaatggaataaccatggagttacggtaactctacatttaagcatttgagaagctgctggcctgtttttcatctgcaccatttgcattcccaccagcatcgagtgggagctccagtctctccatatcctccccagcagtcggttacccttttctgttgcctctgtagcactttctaaacataaaattagcttatttctttgcaggtgtctattgcaccccccaggaatgtcagttccctgcagactctcactctgccttggcacccgcaccccagcacccaggggtgaggtgcctgcctgggcagccctgtcctcacctggggttgactgaccagagaacccttgcgattctctctctgggtttctgtctgcattcctgtcgggataggtgagactggggtgacggctgctcgcggcttggtcaccttcttctctgcttacctgttcatgctctcttgcttttctcggatagcaaaccccgtctcctgtcatcctccctcctggcggaccagagctatactggcccataaaggagtgctggccacaccaggctagattccagttgagcttaaataaaacaaatagaaaggtcctccgtggtattagccatattgtaggtgctccgtagacacatgcggctagtggctgcccacaggacgctgcagatgtggacgtccccgtcatcacaggacgacattctgtgggcagcgctgtatttgtttacaaacacaattctttggctgtgtgaaggttcaggatgatacctttgccattatgattcatttattcatttcaggctggacacggtggcccacacctgtaatctccacactgggaggccgaggcgggaagatcgcttgaggccaggagtttgggaccagcctgggcaacatggcgaaacctcacctttatttaaaaaaaaaaaaatcggccgggtgcggtggctcacacctgtgatcccagcactttgggaggccgaggcaggcggatcacgaggtcaggagattgagaccatcctggcctaacacagtgaaaccccatctctactaaaaaataccaaaaattagctgggcgtggtggcaggtgcttgtagtcccagctactcaggaggctgaggcaggagaatggtgtgaacacgggaggcggagtttgcagtgagcggacatagtgccactgcactccagcctgggccacagagtgagactccgtctcaaaaaaaaaaaaaaaaaaaagaatcaacatttatttatttattatttatttttttgagacagagtcctgctttgtcaccgaggctggcacgatcttggctcactgcaaaccccacctcccagttcaagtgattcttgtgcctcagcccagtgccaccatgcccggctaatttttttgttttgttttgttttgttttgctttgctttcctttgttttgttttgtttgagacagggtctcactctgtcgcccaggctggagtgcaatggcacgatctcggctcactgcaacctccacctcctgggttctagtgattctcctgcctcagcctcccaagtggctgggactacaggctcccgccactgcacccggctcatttttgtatttttagtagagatggggtttcaccacattggccaggctggtctctaactcctggcctcaggtgatccacccgcctcggcctcccagcgtgctcatttatttattttagcatcccttcttgtgcctggttgtaaagttcttcttatcccaggaaacttaataggtcaaagaaccctccccttgaggcagtttggatggggctggctgggaattggtatgtccagctgcccatatcgtggcctctgagtcaattatacaggcatctcggcaacttgaagttttgagtcccaaaacaacagattccatagcataaacagtgcaacgtaaatcctgtcccttgtccctcttccattggatacccttgtttatgttctctctggcaactgcctgtagcagggacggatgctggaaatcctggcggggccacgtcttctgtgctttgtaggcagctatggctggatggtgcttgctgtttctgtgtgtaaatgttgggatttttaaaagcccttccctgcttaatgcgttgtggttgagcagcacatttaaatgcctgaagtgtaagatgaagtctcttggatgtagagggcagtggtggtttttatttttcctggttgaacttggcctttggattgctgactgcgagctcacggtactgttaatgattttctacctacagtcacctgctgtgctgagcacatcaaatacagtgcggttagttccaagctatgaagcgcctgtcacgcatgtataacaggcagacctcattaggagggggccttgcataggggtcacattttccagcatttgttttcaaaatggaaatccagatcacgcatttgagattaaaataaaaaaagcggcctgtgctttatcattttctttaacttacatgcctgctggtccagcccagattgctgatagaggaagccctgagaaagttgcccagccagttgcccgtgcttcaagacacaaagggctgactgaggcatccgtgcctacccttggctgctgctgctcagcctgcttgcatctcgtctgttttcagttatcagtggtgtgagaaaaacacaacggtggattcagaaggagaaaccaagtcatctgcatttggcctcagtgtgtggactgtcctgaaatttgagtacagatgtgttcatgtcctgggattagataaaaagagaggaaacacacagtgaattcttatggtctgtcatttcagttggccatcttctgcccctctgttctggaagcttctccactaaaatagagcacccaacttggttttctacttgctttctggcccatcttgagttggaggaatcatgtgtttcagaactcttgctggtggtgggtgggagatcaacaaatgatttcattaagctgtgtgttcttaataaactttgggaagatttgtcgcagagaaactcagatagggaccttgtgatctcagcagtcatgggtttatcttgtccacacgcgtggcttcattgggatttggttggttgcgatccagcagaactgtggcggtgttgggctctgttggggtttggttgtgagcggaactgtggtgttgggctctgttggggtttggttgactgtgatctagtggaactgtggtggtgttgggctctgttggggtttggttgactgtgatctagtggaactgtggctgtgttgggctctggagtttggttgtgatctagtggaactgtggcggtgttgggctctgttggggtttggttgactgtgatctagtggaactgtggcggtgttgggctctgttggggtttggttgactgtgatctagttgaactgtggctatgttgggctctgttggaatatggctgtgatctagtggaactgtggcggtgttgggctctgttggggtttggttgactgtgatctagcggaactgtggctgtgttgggctctgttggaatttggctgtgatctagcggaactgtggcggtgttgggctctgttggggtttggttgactgtgatctagtggaactgtggctgtgttgggctctggagtttggttgtgatctagtggaactgtggcagtgttgggctctgttggggtttggttgtgagtggaactgtggtgtcgggctctgttggggtttggttgactgtgatctagcggaactgtggctgtgttgggctctgttggggtttggttgactgtgatctagcggaactgtggctgtgttgggctctgttggggtttggttgtgatctagcggaactgtggcggtgttgggctctgttggggtttggttgtgatctagcggaactgtggcggtgttgggctctgttggggtttggttgtgatctagcggaactgtggcggtgttgggctctgttggggtttggttgactgtgatctagcagaactgtggcggtgttgggctctgttggggtttggttgactgtgatctagcagaacagtggcggtgttgggctctgttggggtttggctgtgatctagtggaactgtggcagtgttgggctctggatttggttggttgtgatctagcggaactgtggcagtgttgggctctggatttggttggttgtgatctagcagaactgtggtagtgttggcctttgttgggatttggttggttgtgatctagtggaactgtggtggtgttgggctctgttggggtttggttgtgatctagcggaactgtggtggtgttgggctctgttggggtttggttgtgatctagcagaactgtggtggtgttgggctctgttggggtttggttgactgtgatctagcagaacagtggcggtgttgggctctgttggggtttggctgtgatctagtggaactgtggcagtgttgggctctggatttggttggttgtgatctagcggaactgtggcagtgttgggctctggatttggttggttgtgatctagcggaactgtggtagtgttggcctttgttgggatttggttggttgtgatctagcggaactgtggtggtgttgggctctgttggggtttggttgtgatctagtggaactgtggcggtgttgggctctgtgggtttggttgtgatctagcagaacagtggcggttttgggctctgttgggatttgcctctgatctagcagaactgtggtggtgttgggctctgttggggtttggttgtgatctagcggaactgtggtggtgttgggctctcttggggtttggttgtgatctagcagaactgtggtggtgttgggctctgttggggtttggctgtgatctagtggaactgtggtggtgttgggctctgttggggtttggttgtgatctagcagaactgtggcggttttgggctctgttggatttggttggttgtgatctagcggaactgtggcagtgttggcctttgttggaatttggttggttgtgatctagctgaactgtgatggtgttgagctctgttggggtttggttgtgatctagtggaactgtggcagtgttgggctctgttggggtttggttgtgatctagttgaactgtggtggtggatcccaggagctgctgctgcttgtgcgcttcaaagttggattttgtgtttttttgtgtgcagatgcttcttggaatcttgcgttgctgtatgcctgtatacctggaaagttgtgggaagaacagtttaggattttgaaccaattttctcaacaagtttgattatttcatttgagacatgttctgatgtaaatatattctgaaaaggtgagatcaaacatccactttttactctaaagcaggtccccttgctcctctctgctagtgcattctctttcctttacagctccttctcctttctgaagcaggaattaagctgaagtaactcagaaagtgccagcgttaaccccaggggacagaaaccacagacccagggctgagggattgagtttttaatttccattattctccatcagtgcgttcagtcttttgaacttaccctgactggtattatcacttgaaagttgttgttattgttgttttgatggtagtggtggtggttttttgccacccacaggagagaggggattagaagaaaaagaccaatggagtttccttgggattaattaaatgtggggctgccacacaggaatgggtccaagggctgctgtatttaaataacttacttattttgcagaggtgaatttaacctaacatgtactacagtgatggagtaaaccttttcctgtttggaatatcacaaaaggtacttcaataattgcggatcttcctttgaaccctcctattgtcagatggggtagtggtacagttccttgttccagaatgctcttagcaagttgattaatctgtcacataccccagtttcctcattcacaaggtggcataataataggacatagagttgccgtgaagtttaatgagttaatgaatgtatgatgcttggcaaatggtaggggctcaagccaaccctcgttgtcttactgagcttagtgggccttggacctgctgaggactttgaactgagcattccgtgttattctcttttttgtttttttaaggggatgagagtgtgtgtgatagagttcatgacaatattttgtttaagaaaattgtcaaaacaaagttcaaatgcaatggatggaaagtgatttttaacatgtagggtaactagagatttgagatcagacaaatcgattaggagatcaccaaacccaaacagagaatgtgagttaactcatacttaggagatgaatgctggctttgaagaccatagcgtgcattttcaaaccagatggagaggccacttttctctgcagatttcagttattcgtgatgttaaatgactcgtcttctcttacttgcctggcatgtggaactgagtaaattctgtcaaaagaactcactgaaggaatgtgtaacagctgggaattggatgtcttttcagatttgggagagcctgtgttttgactgtgatggaattcttatggtttaatatgcttaaatattactgtttaacattttgacgtttttgaggacagggataattaggagaatgcacttataagtttctatgccaactgtttccactgctcccctgtttacatggtcccagggtttatacagggctctctgtagccccacaatgaatcttgccccagtgagcgggctctcacctcccttctatagatgaggttggagctcagaagaacgtagagaaacttgtgcatagttattatgccagatttagcagctggaacaggactggaacctaaatcttttttctttagataatatgttctttgcattaatgagtttgtgggttttttgggaggtgagaaatatgtgtaaataagaagtaaaaatcctaaattgcaagttgattttttttcttaatatagtaatacgtataatgcagcaaacatatcatttcccctccatgcttgctagactggcttatgcacacatcatgatgataatgaaggagctaacatagcaagcactcactctgtgctcattcataaggtggcataataataggacacagagttgccatgaagtttagtgagttaatgaatgtatggggcttggcaaatggtagatgctcaagccagtcctagttgcctttctgagcttaggaatcatggaatcatgctctaaaaacttcatgagtatgagctcgcttcatcctcataacaactctaggagatagacgttactttatgtccattgtagggatgagagtgtgaggtatgaaaggaagtgagcttaatattctttatttttattttttatttttattttttgagatggagtcttgttcactggcccaggctggagtgcagaggcatgatcctggctcaccgcaacctccatctcctgggtttaagtgattctcctgcctcagcctcttgagtagctgggactacaggcgcgtgccacaatgcccagctattttttgtatttttagtagagacggggtttcaccatgttggccaggctggtctcaaactcctggcctcaggtgatccatccgcctcgggctcccaaagtgctggcattacaggcatgagctaccgcacctggcctaatattcttaatttggctgtcggttgtcacccaaatcagttaaagcaattccatttcttaagtgaaaatcagaatttcttttcttttttccccttctattttttcttttaatcttttttcttttgtcttcaagcaattttcatttttttttttttttttgatattcagggaacctgaggcgaatgaaggggaggaacctgggagctactgactgtgattacagtggatattcacaaaggaagacctttagtacagtgtgaagtagtgagggaaagggtgatggagtaggagggatttaagtaaaacctttcaggtttaaggtcaatggaaagcgaaggaacattctagaaggacattagattttccttagagtgacattagagtttctgtaattggactataccctttagtgcctcaaatcaagggtttcacattttcttttttttttttggaattgcctgctcatgtatttccatctccttaaaggcaagggctggccgccttatttggctgatactagcctccatggcatcagcctgtccagtggaagtcctgaaacagtacacgatgaatggataaatgaatgaatgaatgaatgaaatgaatgagggaagaaatgaatattgtgcttccagaacgaggagagaagggacgatgatgtggcaaattggcccagcatcttaagatctgtattgactttagcctcatgtggtagtttaatgatactctctcttactcagggaatgtgccttttaagctgtggtctgtggtcaatgtgtgtgcacatctctgagagtcctggctgtgttgtgtttgtgatggctcccatatgtggtttgcctttgtatctgattgtaaattaaccttgacatgtaggtcacctgaccgtgtatggagagagaaaaatcactttcttcttctctacaagctatgtgagtgcagactgaagttccgagttgtgatctcaagcagtctgcagaaactaacctttggcatacttggccacagccgacttctttctagtaaattcccactggttcttggcttttcttgtagaattaacacatttgcaaagttttcttcattggtattcctggtacgtggactggaatattcttcatcccttgatttgtgggatcgttttgtctttgggccacacttgtcatgggaggaaagtcacagctagactgggtatggaaagaatggaagtgtgtctcctgcagggagagcccaggttattgagacagtcttggcccgtgtttcttgaagaagacgttgggttttgttttgctcattgatggccataccccttgtgtggttggccaggaagctgaacgcttgctcccccttgtggctaaatacaggtggttctgctggcaaacccagtggtcaattactgcatctactaaggattaagaagattataaatgtaaactcagcttgaaactttttgtggcttagaggtaaagcaagaaaataattaagataacaactcacatgctgagggtgtttcatgtgttattattgtggatgttaataacaattttggctctctgtgggaagccatttccttcacttaatcagttggcaaagaaagtacatcagggaagattgttcaccctgagccgagaaagtggagtttcaagtaagaaccctgctccgcatcctgccactgagttgagatcatctatttgatttagctactgataaagtgtttttaattacaaattgtctgcttgcttggggactgacacaaacacttgttttgttttcaaagtgccttctctccccagtgttgggtttggagtagagcaagagtaacacagaggttgcagtcagtgtcttccagcgattttcattttgtttgatatgcggggaacctgatgctgatgaaagggaggaacccaggagctactgactgtgactacagtggatattcacaaaagaaggacctcagtacagttccaagtagtgagaggttgatggattaggacagatttaagtaaaacttaacaggtttaaggtcaaagaaaagtgaagcaacattccagaaggacccagaaaagccgagcaagtcaggcactgagatcttgggattgagaggagttgctggttcagacccagcactgttctggaactttcttttgggtactctttttttgtttcatcgattcctttaaaaggtacaatccagaactgaacatgtcattccacaagtggcccaaccagtgttgtatacactgactggacaggttttgccactaaaatggaataatagtctggttttcctaattccaggaaaggaaaatcaaggaatagatacattttttaaaaaagcatttaaagaatttctcctgtagacattatcttaaacttttggtccctgccattgtatgtgtatcttgaatccaagggtaatacgatacgcagtctggcaaaagcagtcattttaaatgattgagcaatatttagtgactttcaaagagcagagagcacaacttggctaccatagaagctccaccatgatgggcgcagggtttcctctaggctggaagttgtgttctggttatcttgtgagagaaatgcatcctgtgtgatttatgtggattcatttattcttagaggaaatcagacaaaaaccatattgtaaggcccaacccatctaaaaagacaatagaaatgagttctgtgtgtttttcagcagggcctcatgggcaccactcgtaagtccagaatctcttccaagaacaggaagtttctggagggcagtggagaaggggagtgagggctcagctctgtgaggtcgaggtgggtgtgaggaccagcaccagtggggagtgggtttattagctgggaaaggccataaggatgaggaagagaagcttgtgtttgagaggataacagggaggaaaagtcgccgagcccagagtgtgtattcactgcctgtcctttggaggcagccgcttccacctcttttgactgattcttccaactcgtatcctccagtctccaaaacatgattgtggtgcagctgcttgaattttcaaacttgatttccattttagaagttaaggatttgtttttttttccaaccacataccctgtcgctaccacatcaaatacaggtctctcatactgttggtcagctccgttttccgtgttgacctctgatactctgtaaacactcttgacacgtaagctgggtggtttatataccaccattacttttcctgcccagctttgtctttttcttccttgtattttatttgtaaagattccccagctcgtccccagttgtgtcagcctcttttcagtgtgctcagacccattaggtataaggcctatccatgttcctgaggaagtctggcccagagccgtccaggtggtctgacctgggcagggccccgggtctgccatcacccagcccatgctctcctgccgccccactgaagacttccttcacctctcttggacgttagggtttctctttgatggctcctctctttttctgggtttctgatattttctggttgagtggtgctactttcttctaacctatttttatttcattaaataaataggattcactaaatggatttcatacccatgggttgtatgatttgcactttgaaaggcactgggctagatgaccactttgagtgatgctgaggcattgctgggtgacttccttctttccttcttccctcccctcctcctcttccctcccctcctcctcttccctcccctcctcctctttcctcccctcctcctctttcctcatgaagcatgtgcacaggtgcatccctgatgctttgatcaggtatggcctgaaagacaagccattttagttagtttttggatacattacgaagtaatgtgggaagtaagcatcttcacctgtccctcttccctccttggctgagggacagtgtcctagtcagttccatgtgctgtgacagagtaccataggctgggtggcttaaacaaaaaacacttaatgctcacagttttggaggctgggaagtccatgatcaaagtactggcatatctggtctggtggggacctgcttcctggtctgcagatggccgtcaccttgttatatccttacatgatgagagagagagaaagcaagctctgttgtgccttttataagagcactaatttcattcacaagggcgccatcctcatgacctgatcacctcgtaaaggctccaccttccaataccgccatcttggggattaggatttcaacacatgaattttagggggacgcaaacattcagtccctgacagggttaggcactgtgtggctggcaatcaccaggatgcctggagccctgccgggaccacgctggctcatttcagccaccctggatgaatcatccagcctaaggcccatgcctggacattctgggtcctcagtgccttgcctttattttacctgatataatccttcaaacgaaaatgctcgtacttatttttgatcacttaatatacttggccatttaacaatacagattaaacttgtgttattctgttagaaaactgagagattgttttctgtagtctttgactgcatgcatagtctagggctggactggggaggagaggataatttggccacaataggattccttattatctgtctcttccctcccaacccctcccccgacccccgccccatacaggagaccctcagatacatttctgtcagtaccctcagttacatattttgggagacgtaatacttaatgaaccaaaactctgttttgctggcagggaaaaaaattgggctgatacaatcaagataatcctatcaactttaggattattaggaatgttgataatcctatcaacattctatcaactctgtaatcagaaaaatatatttaaaataatgcgtgtttgttaaaaataaccaaacaaaatacagaaaaaagcaaagtaaaaattgacaatcccctaactccagtgttggtagttagggacagaagaagggtggaggatgtcttttgtctgtgttacatgattacagcaaaagtcactcttcattctggtagagccatagaaatctggccgagcagaggcagctgtgcctgaggagcctgacttcgaatcagctgtgttcatctttgctaacctcccaaagggaggaagctcaggaaaccaccgtagaaccccctaaaaggggagggtggctacagctgagcaggtgggggcaggcaggagtggagagaggcgaggatgatgagtcaggcaggtgagatggaggctttgtaggttatgttaaggctcctagacttagcatttcaagcagggatgtgacctgatcagatttatattttgcttgcattgctgatggacattggttcagtgctcattgtactggaagggtcaagaatagaggcagggacccaaatttagggggcttcccagggaatccaggggagaggtgttgtggcctggactagatttggaacatccagaaggggactggagcaatgacatacctatacctagtcccagagggccccgatctagctaaggacagagcgtgcagtcttgcagctgctgggctgatgacatgctggggagtgtatacctgggaaattctggtacagagataaaggaaatgctcaagcctccacctatgaatttgcccggtgattaaaatcatacttcctaagctttatagaagccctctgtttgtcccacaaagggccactagcacaaggaaatacataatgtgttcccttgtcattttataaaaatgtagactggtgctgcctgctgtgaaaatgccagtcaggttgcttccttcatagtaatcggtggattcttttgtccatttctgagtggaggattagccctctgtttgccccacaaagggccaccagcacgaggaaatacatagtgtgtccccttgtcattttataaaaatgtagactggtgctgcctgctgtgaaaatgccaatcaggttgcttcctttatagtaatgagtggattcttttgtccatttctgagtggaggattcctttccataacgtggtgtatttgcagtgtttctctcagaggaggagtgcctttctggtgtcatctgtcctgttggtggcagagttctgctgctgaattaaacctttgtgtcggccttggccactcttatggctctgctggaggtaaagccagtggagtggccttgtggcatttgctccaagttgttgctcatttttctgagattatcagaggccttagagggaagcattgaggatttcattatgctccgataactatcacgttgtcaataatatggttctgataagagtgatgggggatggtggggttttgtgagttgacagacgtgggtttgagacccagctctccagtcagaagccagcgccaggcctgtttctcttctctgagttttagtgtcctcaggtggaggggaggataatattaataacaccttcctgatgtggctccactgggctggccacgccatgggcacccagcacggggtggctgccctggttcgtgttaaccatcagcagggttggagagctccctccttactggtgttggaggtcattacctggcgggggatgtggtagataaagcaccttttattgtccctacacaaggcaactatggggtaacacaatataagttattcagattagagaaaatatgaactcttgctacagtgttactgcagacaggcacatatggtttgttaggatgacatttaaaaaaagtcattttgagttacagaataaaatcaaacaaaattcctttaatcaccagggctgggatggaaataaggcaaaatgttgattcctttgaaagacaatttttgggttttttttgttttttttaaaaaaactttatgtgttgatggtttactctggtctagtcgttcctactcctattctgaaagcaggccttgaattcctgattgtgtacaggattgtgtacaaacaatcaggaattcatcattcatatgaagaagttctgtttttccctctagtgtcatgaatattttcatgtacgtatatgttatgtgactagtgttaagaatgcatgtattatatatgtgcatgcgtctcatttacattgaatgtagctaaaaggaatatttgaaaagtataccttgcctgtctccaatttctacatttcaagttaaaaatgggaaataatcttagaatccatgcctgtggttcataagcctggctcagctcttgcattcccagctactgtctgacgaaactcacaggagctgtgaaaacaacgctgttttgtgaaagccaagtaggagcttagggtcatggcaaacttcagagaaatgtaaaggagcaggcactgtgggttttgtctaccccacccccccgaccccaccgccttccaaaatttctttctttttttttttttttttttttttgagacagagtctcgctctgtcacccaggctggagtgcagtggcgtgatctggggtcactgcaagctccacctcctgggttcacgccattctcctgcctcagcctcccgagtagctgggactacaggcacccgccaccacgcccggctaatttttttttattttttgtagagacgggatttcactgtgttagcccgtacggtctcgatcttttgacatcgtgatccacctgcctcgacctcccaaagtgctgggattacaggcgtgaaccacaccgcgcccagccccaaaatttctaattgaattttaaccttccacttttaagttctgatcctgatttataaaaacctatgtaattttcttcagctttcagaaggaatgtcttgtatcttcctatgggggtgttgggggaactgatattgacagaggtcctctgacatttgatagcctggcaaatagggtcaaacatgttccagacctcagaggattgctgaggatagctttctacttaagctagataaaagaagttttgggaatcttaccttgcactctgttttgtagaaacaactgtgtttaatatatttctcattactggctgaatgacctgtatgtgttcaggagatctctctatttaccattttaatgccacatatttaatgagcattcaggcccagactgtgaagactctggaaatgagaattttgtttcctatctcctgtgctgtaacaaaagcagcttaaaaattgcagtgtatagacctcaccttttatcatttttttttcagatttttaaatattaatattaagggtctttatctcagatgtttgttgtttaccaggtcatcagtatctggacgctggcagggtccttagcaatggagggagggagagggggtccagcctgcatgattggatcagtgttgaacctgtcccacctgtggggaagaggcagcatgcggagcagacaggtgcctgctgcaggtcaggagagctggccccaagtcctgacttggagggaaatggtacatattaatatcctttagtgccaggtactggcgtagctagtttatatgcatcacttgagcccccttgcatcactggcatcacttcaagatagacaacaaggggaatgcacatcatatccctgttcactggcgttcactggtagggaaactgaggcttaataatgtgcccaggtacacacagctgataagtaaccctgcaccctcgatctcacagcatgacattggaatccacctcattagacagagctcagctgcctattctgtcaaaaatgttgagttgtatcagctgcagtgtctgtagtattcctagacatttctgtgattctcataagtatctttgaaagggggccatttagtttatttctgcatttctcccttatctgccgaaatgcccgcaggctctgggacaagctgtaaagctctccgtgttatgctgtgttgcaaacccagtgccagtaatgatgcagtgctatttaaagataagaaagcaagctcacagagggagagcgcagcaggatgtttatgttccagaagcataaacacatgacctgtgcccgtcccgtgttcttcgtccatgtccccagagaggccgtggatgggatggtgcaagaaacccatcaggaagcagaattaatccttcctgcgggtggtccctgtgaagaagacacagcggccggtggtgtgacagcccacagctgtcgaaggaagggagaagagagggaccgagggccagcaatagggttttacagctacgtgctaggttgtctcacatctaggaaagagaatgttcatattatatagaaatgggcattttccctgtggcctgatatgaggtatccagaatattcctttaggtattattaagtcataggtttctgttttgatagaaacagcaggtggttcagttagtatttttgttgttgtaatagtagcttagatctcttgtttttgttttctttggccaagacagaaaacattctgccacacacattacttcatgactctggttatatattgagagcagcattaaaaaaaaaaaaaagtccaatttagtccattaggccattcttgcattggtataaagaaacacctgagactaggtaatttataaagaaaagaagtttaattggttcttggctctgcacgctgtactggatgatacaggatgcatgatgctgacatctgctcggctactggggaggcctcaggaagcttctaatcatggtggaagatgaagggggagcaggcatctcacgtggccagagcaggagcaaggggttgggtcacacacttttaaacaaccagatctcatgagaactcaccattgccagaacagcaccaagccatgagggatccacccccatgacccaaacacttcccaccaagccccacctccaacaccggggattattgtcaacatgagatttcggggacaaacatccacactatgtcgtagccttaaggggatcttacctctttgaagcattgtagagttcagagagtaggacattttgtctactgtattttaaaatactaaatgttctgattatgaaagtcagtcctggaaaaaaaaaacaaacaaacctgaaaccatagatgaagataaggaacaaaataaaaattacccacagtctccctcgcgtgtaccgcacagttcatgttttagtgtgtctacacaccatttaatgcaggtggacagactcaggggcaggtgtgccttgctactgctatgtccacagcacctggcagagtccctggtacagcataactgctcagcagttgggtgctgagtaaatattaatacatgtgcatgtggtaccagtcagggcccaacagagggacctcatgcgaggagttgctccacaggtgtggaggatgaaagaacaagttggggcgaccctgagagagcccagagacaagctctgcaggaagcaggcaccaccactgggccaggtgacctgagcccaggagccaagaggatgccctccactgctgatactacctctgcagtgggacgacatcggaccccactgccgatgctgggacggtgcttcccctccccctgaggctctcctaccagggccccctctcatcaggccccagctggaagccaactggaaagggagtcggggaagtttcatttgtgggggtccaagtgccaagggacagacaagggaagggtggatttgcagctaagaagatagtaaataaccagactacgtgacagtctgaagaatcaaatctggaatcaaattctactctgctctaatgtaaccctgtattttactgtgaataatataccgtgggtatcttccttgcttgatagatacagctccacataatttttctcaatgaaacagattctggagtaggcaacgttttcctcttttgtaaaatacaccaaattgtgaggattgaatgagataatgtcaaagtattagtactttaccctagctgattgacagtatccagtgatagtgataataagggtaattactactctagccaattttatcaaacctatggatgtttaaggaattgggttttttttttttctcctttgatgaatactcctgtaaatacatcgttgcctgcttgtctgagtctttctgtgggtttttagaagtggattacttgcagcaaagtctcctctacttaaggctctttgtatattttgcctaattgtgctctagaaatacatcaatttccagtcctccttctctcagaccacctgtccctcacattttcaccagttctgggtcttgttattctttttactctttgtcagtcaggtgattgaaaaatgtacatttttttaaaattggcatttattagtgagcttgaggatgtttttcacagtcatatggaaacagttctgcttcatgaacaagaccttggggccacatactggcttgttcacctggatgcattttctcagtctccctcagaatcatttttctccctgaaaaatgggattaaaagtattaatagtagtgcccatctcacagagtcattgcgaggattaaagagaggatgcatagatgtattgaatcagtgctgggttctggtagatgttcagctagccctagagattattagccatttgatgtgctgatcctcaggaaggtgggcgggagagacctagacgcagaaaaggagctctggagttgaggtttctagagatgaggtggtgcgtggtggcccagtccagcatggctctgggtgtgagcacaacataggcagatgtgtctggggctcagggagtcatttgtggattgagggtgctatgtgggtgtggaccacggtgatccaggatgatgcaggatttgggccggggaggaagatggcaacccaggttccatgccatctttaaagaggggatggttactagggtgtccagcgaccagccaagtggcctatagataataaggaggactcttcatgacatggaggctgaggtggaaagtcccagagtagggttcagccctggccctaaaaagtgccggagaacctgtagcctcctggaagctgtgctgtgtgcagagccaagcttcagtgtgacaaggaatggtgggagcaatttggagaagaatgaagacttggtgcagtggctagggaggcaggcagggtgaggatgtggaagggtgcagagctgctcaaggtcagcttcctgagcctgcggtgtggtcccttgctccacactcagaagggccctgtgtttgatttaatgctcttttcttgccatcttgaaattcttgatagtttttgaacaagggatccatgttttcattttgcgctgggcctggaaattacgttgctggtgctgaggggatgtgcagagcagaggtgggcagagaactgacgagaaggacacgtgggtaagggtgggatgagctggcctcaggactccgagcagagctcatgtaaaggtgtcgggcccaggatgcgttctcaggctggggtgggaggcctgatgatggcagatttctctggattacaaatagaatatgtagcagggtggttcatagctttgtgtgtctgtgtgtgcattggtaaatttttattttgaaactaaaattatttcaaaattagagaaaggctgtgagagtgcggttgagctggtgttggctctggaacagggtttcccaatgcaggcggcactggtaactatgtgccttgggtcattctttgttgtgggggctgtcctgtgccccatgggatgttccctgcacccctggcctctgccttctagatgctggggggcactttccctggtgtaatattaaaaaaaactctccacgttgccacatttggggggcagaatcaccccctccccaaattgagaagctatgttattggaacacagtgtcctgtattttgtctagcctctgctgcttagagctgcctgagcttggagaagatacttgttctctttccaaagcttcactgtccctttctgtacattgtcaggacggctgttaataccactgctctaaatgtgctcagttttgcataaacatcagctaatgttaaaattttaatctctgctaatataagaggcatcgaagtacacgcgagttcagtttgcatatggtgaggagggagacggcctcatatcgtatgtgtgtatttgccgattctatattttgaggttgattcctgttgtcttttgttcagttgtctcattctgttttcttntggggctttgaatgcccttttcatgcctgtgacctntctttactatgccttttcttctctgccagcaaatctcatccattcttccagggcaccttactgtcccccaaagccccagtgactgctctgtccacagggcttggtttctgtgctctggctctgcaatgcantgcagaaggggctgggctcggaatggngttgctggtcaggccatgtgcccaggggaaggacacaggactcanggagtccacccctctctcccccccttttttttttggtcactgaaatattttctttccaattctactagtcctgctagagctgccataacaaaatacccaattggtgacttcaacaacagaaattgattccacactgttcttttttttttttttctttttgagatggagtcttgctctgtctcccaggcaggaatgcagtggtgtgatcttggctcactgcaacctctgtttcccaggtttgagcagttctcctgcctcagcctcccgagtagctgggactacaggcacatgcactgtgtctggctactttttatattttttagtagagatggggtttcaccatgttggtcaggcnggtctcgaactcctgacctcaagttatctgcctgcctcagcctcccaaagtgctgggattacagacgtgagccacttcgcctggccatgatcccgcacagttctgaaggccagaagccaagatcaggagaccagtggattgtttctcccgaggcctctgttcttggcttgcaggtggccccttgctgtgccctcacatggcctttgccctgcntacatccgaagccccagtgtctctctgtgtgtccaaatttcctcttcttagaaggatgccggtcatattggattagggcccacccgtgtgacctcattttaccttaataacctctttcaagtttctgtctccaaatacagtcacattccaggggctagagcctcaacatggaagttttggagggagacacacttctacccataacaccaatgtcatattaagctttatggaagaatagaccaatatgtggtgggttcaagaatcttttcttagaagaaaagtgaatctgtatatttgatactttatgatttccttatttgctctaagcagttggtaagaatctcagtgtcacttggctgaatgatacactactggtgcctccagacctatgaggagcctaatatttttgtcttggttgaaacaatgcaaatcctgggttttggagatgctcacagccagctgtctgattacgtaaactgaaagtggcagagaggaagcttttgcntggggaaaacatgaaatatacaagggttcctttaaaacagagtgtacttctgaacatttactgaaggtggagggccctggacacctgatgttatcttatgtggcgttntctgggtcagatttcattgcatttcctgaagaggtaacttggcagtcctgggagaggctggaccttggtgtccaggtggcaggttcataagacacctgtgatttgatgtgagccagtcacagaggaagccatttccagagaggaacaaccgtgtagactgctttcctgggantcaagttaaaacttctctcctgtgaccttgtcacccngcagtggaaagttacccttggctgcagccacgacttccgcatactcttcagaacttgctctgcccttgagttttccagctttcctttaatgcactaaacctttaatattgtattctcctaaatgagacgtctcgcatttgagcangtaacactcggtaagactttgcttggtgggggaggaggttttaccttcctgtggcattctgaagctctccacatccacccatagtcatgattgtgttatatgacctcaagatgctggagctgttaattcatctttaacataattgacctgattacttctttcttgaaggattttgttcaaacctcagggtttatttaggaacaagtctaaccaggcctgattggttttcctaagtggagatacagctttgggaaacaaattaagaaaatgaatggattgaaaatgtaggaacaccgtgacagttgtgaatttttcttattgagggaaaaaatgggtatctgtgaatatttctcttacactatatagtgagaaatgacactctgctgtggatggtaatttatttctgtgtaattgcctgagtaaggctttctctgatattgaatactgagtagaactcttaggttatttttggaagaattatggattttctcttaggttttagaatattttttgtttgcctgttaagagaatttgatgaagatttcaatgtaattaaccaaataaaatggcattctgtatcctgggaagggacgatgtctttcagttctaaatcaatgcatcatttacctcctatctctcttgctggccgagccatcaatcctgtttttattaaatgttgttgttattgttttgagacggagtttcactcttgttgcctaggctggagtgcaatggcataatctcggcccactgcaacctccgcctcctgggttcaagcaattctcctgcctcagcctcctgagtagctgggactacaggcatgcgccaccacacctgactaattttagtagttacagggtttctccatgttggtcaggctggtctcgagctcccgacctcaggtgatccgcctgccttggcctcccaaagtgctgggattacaggcgtgagccactgcacccggccgttttttgataaattttaaacttctggtttgaaacttttgtttcctgtgcttaaaaggagacagttaaaagcactctgatttggactgacagaatgttttttagatgttagatagatctagctttgaatatttatttgcagagaagtagcagggaggactaggaatgactttttcttaggaggtgctatgcattccatcaggtgactgacccctttgtgagctgtagtggtcagtcccagcatggcccacacttgttggctgtcttagccatggtggctgtggttggcgggtacccagccaagggttttccatactgggggccttggtccagtgggggcgggtcgtaccatgacccccttctcctgtgatcttgcctcactggcccaggtaaattggtggacgtccttgactcctccacctccaaaaggactttgaactttggcactgttgggagtttaggctacacctcaaccaggcagagattgggatctaacctacttttaaaagccctctacagggaatttcataactttcctgagtgttaggttttggtgattaacagccttgactttttggagcccttcctttgccaaacatgcattcctcaggtgctcacttaaaatgattcttcacaatatgcctatagacgggtctgtctggtacagcatcctggagtggtgtcaagggaaagaaacatgctgcttctgccacagacggaccatgcatgggaagaaactatttgagaatggctctccaaggggctggtcggccttgtctgcccactccctctacctttctttgttctgtttctttctcttcagtgttggtccattttccttttttcactgttgcgtgttagcacatcattactcttatctccatatatttggatgtttcctgcattatggtgagcttcagtaggtcttggatgagttagttgttctcattccaaaatgtaaatttctggtgtttagtaggtgctcagtaaagcttgagaaagatgaaagtgagagcccagaactagtataaaaatacggataccaccatagcatggtaattaaaggggtgattgtgaagatgaggtagctgtgcctggatgtgtgtgtgtgtgtgtgtgtgtgtgtgtgtgtgtgtgtgtgttggctggagaaggcttaccagtggtgctggacatgtcgggtagagtgttaatagtaacttaattgactgaatttggaaataatctatggggttagagagcaaggaggtagctgtgtaagaggatggggtcggtgaggtggggtggtgtgagcaatggagctcaagggctcaaggtgcaggcctggactgatggccactaggaccaccccaatggcttcagggtcaggacaggaagggaatgtgattattgcagcaggtagtagggcagtatgagtgtattattcatatatgtgtgatgaaatggagcatcaaataatatatcccataggatagaaaggcacagtgagtgagtttgggttaaaaattcgatgagataaagtggttgtacctcctatgaaaacaatttaatttcttattatgaaggcattactcatgttcttcagaaaaattaaaaaaaaaaactcagtcattatagacaattgtactcaagatgaaaacaccctgtactgtcgcaaccctgaagcacctctgttaatatgtgtgtgtcttctcacggggtgattcttgatcagagttactgaaacagcaaggcttgggaacaagaggcatgagagcaacactcaggacctgttcagttttctgcacagttccaggtgctcttccagcattgctggctccgagagagtcaaatattcagagcttgcaagctggggaggaaaggggttagggtggagataaagatctgggagatctacagatacggatcatctgcatttggaaattttgtttgcccttctcacacatttccatccaagttttctttggggaagaggggatccctgcagaggagtccagttgcaaatgtgaaatcttaaaaatgtatgtaaatagcatctttcattccgtgatacttgtttgtttgaatagaacattgttaaattttattgtgcttcagaatcatctgggtgcttacaaacatagattgctggactctggttctggagattcggattctggaagtctgaagtggggcttgggaatctccatttcttccaagttgccaggtgatgctgatgctggtagtcgggagtccgtactttgagaaccactcttctacctaccaagacttccaaaaaattggtactctgggaagatgccctgtgccagtcctgtggcttcttaggcacctcttccagcatagactcctgcagagaacctggtacctgcaagtacctagtacctgcaagtacctgcaagtccagtgtgggaaatctcatgacaggcatcaacattccgtgacggttgacagccacctatggggtggctgatgccttttctgtgtcttcagggctttaggggaaggagagtctaaatgagtggttctaggttgtgggaagagcctggctttgatgttcagacacctggcctcaggctgcatcgcccatacttcctgtggaatggttatcatgagtcctgttgtcctgtaggtgaatcattgattcctgtctttgcataacctctcacttgatgataatttttttttaaaaaaatgactcttggaaacagaacacacagtttgtaaagggacctacagtacagcagaagctttgtggaaggatacaaaatgtgagggactgtagtcgaagagatttaaattggaagtgggaagagattgactttttttttttttttttttttaaagacagagtcttgccctgtggtccaggctagagtgcagtggcacaatcttggctcactgcaacctccgcctcccaggttccagcggttctcctgcctcagcctcccgagtagctgggattacatgcatgagccaccaggcccagctaatttttctatttttagtagatatggggtttcaccatgttggccaggctggtctcgcaaactcctgacttcaggtgatctgctttgtgtctcttagggagcatgtttgaagagtcaaaggaaaaccaagtctgttagctttgcgaaacgtttttttttttgagatggagtctcgctctgtcccccaggctggagtgccgtggcgcaatctcggctcactgcaagctctgcctcgtgggttcacgctgttctcctgactcagcctcctgagtagctgggagtacaggcgcccgccaccacgcctggcaagtttttctggaatttttagtagagacggggtttcaccatgttagccaggatggtctctatctcctgaccttgtgatctgccctacttggcctccaaaatgctgggattacaggcgtgagtcaccgcacccggcccgaaatattgttaaaaccaagtacctttgtgaaacattgttacaaaaaccaagtaccaagtgtgtggcattaaagtcaaacattaatttcaagttacagaaagaaatagcactgagtagaggttgatcgataaaaaatgaataaaatattcaacagaaactccttaaaaataatgtgagaaatggacatgtgacatgggcgtttaaaaagtctgtaaggccaagaaaagtttcctgaaaggaacactgtgcccaggcagtcctggctttgcaggattccctgataaccgagctcaggcatcctgcagagtgagtactgcccagatagaaccttctgcctctttggggtaaaattcgatttcaaagagagagaactgtggggtgagaaaggaagactgggacccaaggggccaaactagtgacaatgactgctgtcatgaagggtgacaaggacaatacctgctgagctcaaaccaccctttggacccagtgaagctcagatgttgcttccagtgcaggagtagttaagctcaactgttttacaatatccagttatttggctgggtgtgatggctcacacccacactcctagcactttgggaggccaaggtgggtggattgcctgagctcaggagttcgagaccagcctgggcaacatggcaaaaccccatctctactaaaaatacaaaaaattagccagacgtgatggcaggcgcctgtaatcccagctacttgggaggctgaggcacgagaatcgcttgaacccagggaggcggaggttgtagtgatccaagatcatgccgttgcactccagcctgagtgacaagagtgagacttcgtctctaaataaataaataagtagcaaaaacaatccagttattcctcaaatatttatgagcacctcttaatgtttcagatactattgtgacaagagaaaaatgtgtttgtatatgtaaatagaaaaacaaaagtgatgtggaagcgattacttctgtcattttggaactaccttcctcccatattaagtccatattatgacaattcaaaaataatcaaacttcgtaagatattacctgtgaaaggaataagtatttaaaaatgtattttagatggccttttagaaatctagtccgtggacacaatctagcatcatgcagttgccttcaaaaagaatatcctaaagttcttgtttgttttctttttcctttcaaagtgttctgttgaaaataacccatttgtcattttagttttgatatgacttagttatacatgccttttgaagcagtacccacccacatagtaattgcgactatcttgtgttttgaaaaaaaaaaagcgagacaatttgactttgatagttttaagtttaaaaaaaaaaaaaaacgctccaagttagactcagatgaaatcctttgatcttaggtattttatgaggaaactggaaaaaataatttcacaaatttctattttgctttataaaaattttatgattcataacacagggaaaatccagtaagctaaggcgttttttagttgtttatcttgctagtgagtctttgatgtgagttatttctttgcagtaaggtggcatggatgggtgatgaggctaagctgaaaagttaaatctcataatggacatttgcaccctttaaggaagtaaagctctcaaagcatgattatggccaagatgaggccggtggcatgtttgtctcctaaatgtgcagccaggaatctcgacggtttgtctgaggtatgcaggtgcctggtagataaattagggtgagcatcattcatggcgtgtggtcagttgcaggccttcagccacagggatgacagaagggaagtgaggaatcagggatgggtttgaactgcggcgttgctttgggagtctctagacatgatcagttgcacatgtactgttctccttgtcaccctcaggatctactgtcctgtggttgaagcctgcagctctcccaagttggtggcactgggcttcctgacttctcgatgtctaatgagacagtggaattctacttgcagccccactgcaggccaggtttatctctcctctgtcttcccagctggtgatttggtttctcagtgctgttttgggtgcacttttgtggaggattcaagctggtccttagccactccttgaaccagaacctcttttactttcttatgtagttcttctcttcctgtttttatatcctaaaactagtccagcgaccagcccatcgtagtagaagcgttggtgttcttcctaaaaggaattgtaaacatctcttggagagtgggttagccaccataaattgttttgggacttcggatacccccttccgcaaatgctatctagagatgctttaatttcatttcaattggttattgcatccctgatattttgaaactgttatgagtagaaaacattctggtttatgaacaatctgcttttcactatgaaatagatgggaattgtaattattcctgcgctttgtcttagagaagttacatgcatgcatcaagtgttgtgtgatcttgtgcagttcttcttagattgagtttttggctcctcgtgtgcaggccttctaaaatcacaatgtccctgagttgggaaggaacatcaggggctatctggttcattatcctaccccccaccgcctcccacgccccacatttctggcagcctacgagtctttggtccctccccagtgctacctggccagctctcagccttgggaggccacctgcccgtgtttgacctgggttaatgaccgccagttcctttcccttaatacgactcatctgctctcctgcatgctcgctccttgggtgagagctgccctctgcaacctcataacggaaaatggcttgacttctgccacctcctcctccttcccatgaaagaatctggtcttttctatctctctattatttttaaaaccagattaggttggttgtggtggctcacacctgtaaaaatcccagcaccttgggaggcagaggtgggcagatctcttgagccccaggagtttgagaccaacttgggcaacatggggaaatctctaccaaaaaaatacaggaaaaaaaaaaaaatagctgggtatggtagcacacacctgtagtcccagctacttgggaggctaaggtgggaggattgcttgagcctgggaggtcaaagctgcagtgagccttaatcactccagtgcactccagccggggcaacagctagaccttgtctcaaaaaaaaaaaaaaaagaaaaataagaaaaagaaaccagattaaacattcctaagtaattctttttgtgacttttgcctgtttattaactatcctggctacttaaaatgaatttttgagttatgaatacatttagatggttttaaattcaaagaagtctcttttttctcagtcacttccatccccagccaaacagttcttatccccagagtcagccagtgttaccagtttcttgtgtccatgcagtttgctttatgcatttacgtaagcaaatattcgtacacacacacacagcctttctatcttatggaaagttatttcagtggcacatgtaagtatctcagcatctcttgattgtcattctttttggattttttttttaaatttcatacttacaaatgatcatgtatcttaagttttctgaagtagccttggtttcgcattttgactgtatttattatggtatcaggttccatatttcttaaaagtaatactgctgctgcacttacattgaacaagtcaccaagctctgttaattttgcctgaaaaatgccactgctttgacatgatagaaaacacaggcaatagtctttatttctcactgctgtttttttcttattttgaagaatcaccctaatacataggaaaatctcgacttagcaaagagataaatgagactgtaattattgcattgggtttttcacaatgtatgttagttatctattgctacataacaaattagttttagagttagcagcttataaagcaacagatatttattatctcacagtttctgtgggtcagtaaatcaaaagtggcttaactgggtggttctgacatgtgcctttccacagtgactggtatgtagcaggcaagggtctcttatgatcctgagtgaggatgtcagccaaggctgctgtcatctgaaggcttgactggaacagaaggacccatttctaaaatgagtcactcacatggctggaggcaagaggcctcagttccttatcgcagagattgctccttggggctgactgagtgtctgcacatcatagcaacagctggctttccccagagggaatgatccaaaagagaggtggaagcctaatgtctttgtgacctaatctccaaagtcacacactgtcacctcttccatattctattagaaaggagtcactaaatcagatacccatgggaaattacccacctcatgaagaaagaaatatcgagaatttgtggacctgtttcacaaccacacagcatcattttttgaaggtagagtcaccttgagcatttaaattagggttctgctctagaagtctatccctttattttttcccatttgttaaccctttttctacttggcataatagcagccattacccagtagaagttgagagatttaggttgcacagaatcccacagtcttttcagaaactcatatccttagggtgtctgcttgttgacagcattgtagaattgaaacttgaccacgtgttatgtgttgggctgccagtggtgatcagagatgacggtgagtagtccgttgagttagggctgtttgcctctgtcggtgtcatctgggtttgaactggacttgcagtcctggtgggctgctttcatttccaccctgggtctttgttctcaccactcacatcttacgcctctgttccaccgctgtgtaagaggcaactgtgcacacaccttgcctctgccattgactgtaagctcctgagagagagagagaatgtgtctggttcagttttgtggccctcctttttgctagcataatgcattgaacatagtatcattctgcatttttgttgagtgtataattagatggtcaatgtggagaactcagagggattttaggagggggtggcagcaatataaggttgtgggacccaacattaagagagggaaaggtgtagcgggaaggcgttggtgtggggagggagaaagtcaagaggattcaacctggcaagagttggaagtgacaggaaggtgtgtggggtggggacgcaataggacagtgtgtgagattttttaaaaaatgcaggcaggggagggatgagtaggcagagcaccgaggatttttaggacagtggaaatgctctgtatgatactataatgggggatacatgtcattatacatttgtccaaactcaaggagtgtacaacaccaagagtgagccctaaggtaaacgatgggcttcgggtgatttcgatgtgtgaattgtaacagggatactactctggagcaggatgttgatcatgggggaggctgtgagtgtgtcgcggtagggggtacgtaggaaatctccgtgccttctgctcaattttgctgtgaccctaaaactgctctaaaaagagtagtcttaaaaatgcatgaaataggatcctgtctcaggactggggcaagagcaggtagaaatggaaagagtgactgtggctgctgtgtagcaggcacacaatggtcatggtccatatgctggcttagttattttttaaagcaactaaagttaagtaatgtatacttaacttacatatttatgtggtccaaaaaacgttggtcatctgttttaatgcagagagtgtttaccctaagcctgcaaatgtgatgggtaatagctagaactagaaaagtactttagaatatggaaggtaaatacatgaattaatttaggtaagagtgacaaaacaggggaagtccctgacttagaacttattgtccgcttggacagctggtgtacgtgatcctggggtcacagtggctccctgtgcaggaagaacactatttcccagctcagataccatctttttaggagagtacctgccattgtggaaaataaggataaaggataacaagttacctccttaagacaaagtcataggagaaatggtaaattccagtatcttgagttttgagttggaacttgaaatttattttactacaagaacactgttgatggattatgtattttatagactttgtgggtggctatgggactctagtaactgcttatgcacagtttatatgagtagggctgctggatttccagatgacgctctcgcaactgaaccttcagattaccacctgtttctcagtttggacactattagtgtgctgctgtcacttatggctcgggcaccttatcttgttttatgtcttgatgaagaagtacaaaattcagtgtaaaagaaaaacatatgtaaagcttatagaatcaccccgttacacaataacaatgcagaacaatagattaataacaggaagagatgctgaaacttctcttcagcctagtttctactctgatgtttcttctctgcattgtacagccaatctatgaataatattttcattgtctaagcaaagccaccttagctaaatatttaattctactggagtcataaacagggttcaaaatatcacacatagattttatgaaagtaataaaatgcttcagaaagtacagtggctcagcctggggccactgcatctgataatttggttacacaccttgtcatgtgcttcctaaaagaatgacgatggttgcttatctgtgtttaagcttgtcattttgaggaaacaaagataagacatttttgctgtgtctctaaaatgcatgtgtaaactatttttatagagtaatgcttcagagaggagtaaaatttcctgcaacaggtgcttgtaaacagtaattgctcagtaaaggtcacctcccagctgttgcctacatgttacataagagaaccccttcacgtcttccgtatttgcagctctgtacctttgtgagtcacctaaaaaataactcatagggttgtttttctttctttcttttttttttctttgagacagggtctcactctgtcgcccaggctggagtgcaatggtgcgatcccggctcactgcaacctccgcctcctgggttcaagcgattctcctgcctccattctcctgcctcagcctcctgagtagctgggactactggcatgcatcagcacgtccagctagttttatatttttagtagagacagggttttcaccatgttggtcaggctggtcttgaactcctgacctcaagtgatccacccatcttggcctcccaaagtgctgggattacaggcatgagccaccgtacccggcaggtttgtttttcttatgacaaaatcaagcctggatggtgtcgttaacggtgaagttaaaatttttcttttgctttccttaatatttccgtgtttttttctttttctttttttttttttttaacaaaagtctggtttctaaaccaaaatatttaatgcttcaaaaggaaaaaaatgtaagtcagtccaaagaaatgattcattttgcagaggtaattactactaacatcaacctttccaggtctttttctatgcagctatatcattgacatttttttaaaaatgagattacattgtactggagggtagactgctataacaacttttggttttggatgggaataaacagaaaaagtctcatctccagttcatttctggggagggtcaggaggtggggggtgcttggctctactcccttcgtatgattttcccttctttatctccaggatcttccccatttcacggagagacatggatgagaatgaaggctgctgagtgggaggggcttatggggccagttttgaagaggcctcataccttttggccacattccattggccagaactttgtcatatgactgcacctaactacaaggaagactgggaaatgtagtcaagttgcatgtccgggtagaaaagggacacttttctgtggaatagctagcatgtttgtaactcaattttataaaccattttgaaacttttcttaaaaaaagcttatttcagacacatttttatatgctggatctgctcacctctccatctctatcttattaaaagttcttgccagaatctctctccaattgttctccctccttctgccctgttccctcacagcagccacagtggttctttcaaagactgaagctacattttatcactcgcctgcttaaaactttacagtgcttctcccccagtggtcgggataatgttcaccctctcctgaagctggcctctgtggtccttgaccccatcaggtcccacggtgccctgcatggactctgccatccttcaccagcttccccccatcaaacggggcttgctgtcagctcttcctgcaactcccagccctgccgcaccactcagccttcttccttcaggcttcagctccagtgtcttttcgccaaagaagcctttcctgatctctcagccataaatgttcctctccccagttgctttttccctctccctctactcagttgctttatttaactgtcatattgtctttggagcacttgccaccatcagaaattatcttgcattatgtatttatagtctgtcttccgcctactagatggtgggttgcttgaggcaggaactctgtcttgtttacatctctatctccagataacgtgtctggcacgtgatgggtactcagtaaatacttgtggaataaagaaatgtcattacaggttctctatgcattaaaattttttagaaatggggtgttgcagccgggcgcagtggctcacgcctgtaatcccagcactttgggagactgaggctggtgtatcacctgaggtcaggagttcaagaccagcctgggcaacatggtgaaaccccatctctactaaaaattcaaaaattagctgggcatggtggcacacacctgtaatctcagctacttgggaggctgacgcagaagaatcacttgaacctgggaggcagaggttgcagtgagctgagatcccgccactgcactccaccttgggtgatagagtaagactctgtctcaaaaaaaagaaaaaaaaaaaaagaaatggggtgttgctatgttgcccaggctagagtgcagtagctttccacaggcttgatcgtagcgcactgcagccttgagctcctggactcaagtgatcctcctgcttcagcacctccccgagtaagtggtactataggtacttcaggttttgaagcatgtgtaaaaaatactctagcagggacatcatttgagctgagcaggccatggaggcatcaaatgattagcagtagggtacaacttgttgtgagaaccagaaaagagccttggcctacataacatcctgtgctaaagaaagaaccctgactcccagcctgtgagtgttccagagatgggcagagcagtccctgcagcgcttcagggaacagggaagagcagctaacccctgatgcttctgtaagcactttgggacgccctttgctatagtagggtattgtcttagttatccctgacttgcctggtgttactttacatcccttaatcctttcatgaagactggcaaacacattcagtcctgccaaccttgaaagtaggccatgtttgaaagaacattggcacaaacgagttgcgaacatcttctttaccatattcatgttctttaccgtattatgaggacactgtgcttgccacatgggcagtcttgttttggggatacgtggttggatggacggttgggtggatggaagactcctggaatgtgaagtatctcaaggatgtgtgtccattgcatgaatgtatgtttgatctatgcagctaattgacaaagatccaccatcctgtaccctccatgttttatttttgccctgccattgttctcttcgacattctataatcatcaaggttttcttgccctcacctaggtcttgactaaacatgttgggtaaatgaatttcatattactactttcttgcgccgtcagccattgtgttcttggggactccatcctgagccttttttttttttttgagaccgagtctcaaaaacagtgaaggcaggtgactggtgaggagagttccagccactggattctccctcagtcccctgtgctgtggcccttggtgacccctagatttcagtgcccctgcctgacactggagtccctctgtaaagaagcccctttctagctagctagctgttccatcccgcacacccccacagaagccttttgctgccattagtaagcacgcctctattttctcacctgtgattgatcatgcatgattgagttttgtctattaaagcaattgataagttactaaaatggcaccaaaagaaattagaaaaaaattgttgcaaatgtcagtgaaatcttttaaaaaactgttgtactttagaagtgcctcaagtgactaatggaggcttaggactctgagtggtgtcacaaggaaccttatgcacagggacactgacattagcctgtactgtcacccaggctggagtgcagtggtgtgatcttggctcactgaaagccccacctcccaggttcagcaattctcctgcctcagcctcctgagtagctgggattataggcacatgccaccatgtctggctaaattttgtatttttagtagagacagggtttcaccatgttggccaggctggtctcgaactcctgtcctcgtgatcggcctgcctcggcctcccaaagtgctgggattacaggcataagccaccatgcctggcccctgggccattttttattcttactcttaggctaggtttctgcagaccttggttataactgcaggctctacattgataactgctgagtctctaagtcagaccagacgtttctccccatttagtgatacatgttttccatccaattgcttcatagacaccttggacacagtgctctatttcaatttatgttgacagttcatgacccaaactggaaacctgagttatcctggacttctgcctaccaccttctcctaagccatctcacctgtcctaaatgtcgtagcccttatctagttctctaagctgtcatagggtcctgtactgctgggctgcttgttgccttcaatagagcctggagcatattcatgtcggtatttcaaggccccgggcataagagcttcttaggaaatattggaatgaatgaagaaatgatgaataaatgaacaaatgaacagttgattgatttccaagacactttggggtggtttccatttagaatggtttttatttctttttactggaactaaggaattatttttgcttgttgatgccaacattttaaaagcactataattttgaaatgttttaccacattaaattcttttctattgcaggtcacatacaaatatgtcaacttcaaaggaggaattatttgttatatttatgcaaacttgtggcacttggacatttatctagatggttttttgtgtatgattgtgttcttggtacagctggaaaagctaactttaagtggcaggagtaattgatcttaatgacttactttgaattaaacttgtgcttaattaacttggatgttctaagtttctagagtcncagacttttagagctggaatattgctttttgaacttcagtgtaaggaagaattgcttatgctngaattgatttgttctgtatcccaatactggactgagtagaaatcaattactttaatattggatgagagagtgattgattgaagatcaggtttttaacctctttttttgttctccttctcacagggagagtcccgtattctcagagtaaaagttgtttctggaattgatctcgccaaaaaggacatctttggagccaggtatgttggctttgtttttatttctgtggacttctgaaaaattgacaagcagttttcaaattcaggcacgcatcagaatcacctggaggacttcttaagacaaagctggctgggccccacctgcagggattctgatttaggaagtgatgctggcccagctggttccaggagcacattttgcacagggcttctggacttaccatcacaacagtagttaacagcctgttcttcacatgggctaatttcatgagattagcttctggtgttgtattctcagtagaaaaatacagtgtgggactatggctctgcttattttaatacttcaaaaatatttcaaacttagggaaacataaaagtgtcattttgtttctaggagaactggatattctggacatgtataatctgaattaagagatttggtgatttggggcgaatgtggtgatttctgtggcatttctagaagtaccagcagggaagcagccagatctttctgtgtgtttcagcttttttattttcagtattgcacttggatattcctgtatctttaaatcagcccttttgttcctattggctgtcagcaatgtgttgcatgaagttattggactgggagcagggtgagggtagccgtagagccacctggcactagaatttagccagattttggagaccaaagatcttttgaactttaaacctggaatggacatgagtgatgttctagtccaacttttccattttatggttgacaaagcttgaatccagaaaggttaaactacccgtgcaggtcacgtgggccagtgatgtttgaggagtgacaggaacactcctcctgcctctacccagtacattttcctttgtggcatggtggcctgaaaatactgtgaggtttaacaatgaaggcaggtgactggtgaggagagttccagccactggattctccctcagtcccctgtgctgtggcccttggtgacccctagatttcagtgcccctgcctgacactggagtccctctataaagaagcccctttctagctagctagctgttccatcccgcacacccccacagaagccttttgctgccattagtaagcacgcctctattttctcacctgtgattgatcatgcatgattgagttttgtctattaaagcaattgttaagttactaaaatggcaccaaaagaaattagaaaaaaattgttgcaaatgtcagtgaaatcttttaaaaaactgttgtacttagaagtgcctcaagtgactaatggaggcttaggactctgaatggtgtcacaaggaaccttatgcacagggacactgacatcagcctgtactgctggtaatgtcagagtgaagcaaatcccacctgaaggcactctcttgcttgaccgtgaagtcacactgagtggttcaccatgtgcctgcactcatgcaaggataagccaggtctctaggcatgggcagaaggatccctgcttcccttctcttccctttcagagcaacactttcagccatttccatgagtctgggctcttgttacccagctgaaatactgtttcctgaaactcacaaatttgctctctaccaaagcccaccttatgccctgcctttccatgaagcctgtcaagaaaattccaagaaagaaaatttgatattcctatatcaaagcgtgtgtctttcctctcctaatacctcttagctgccacagtaggtgcaatgtcattttagcttttgcagatgcattacctggtggtttcctagtatttctttcacttgcctcgattgctagattagaaatttactggggacagacatctttttaatatctttctcctactacttaacatatagagcatcaagggaaaaaaaaacaaaaattatcttttaaaaatgtaaacatttgcatgccaaccggtagtggattgtgcccttaggttaaaaatatgtattctcactctttccaatgaaatctgtagtgctgaaggagcaagttggatttagaaaattttggtgatttctttttaagcttgattgggtttttattttgttttatccaaaccctcccattaaaaaaaaaaattgattcacattgtatttctaagccagttaagtagatttaaggttgaatttgtagtggaattaggctccaaatcttagaagagcaaattcgtaccttgaatttttactgtttagataataacaggcagggtcatttctaagggacatggtggaaaggaatattcgtgatattaattagaaagataaatcgtattgtggccaagtggaccaagtgccagaaaatgcatcagaaactctgaatcctgcttctggtcttcattttcctagattgataagtaggcgcacacattcctgctttcctccctcctctgaagtgctgtagttcttcagggacacatttgccagtgggtctgagatgcaagtgtgaggtggcagtgtgggttaatgccatcttggtgtctcactctggagtggcactgcttattgccttaaaattttgccagatgacctgcattctccctccatgctatcttgggcaaatcccttaaaaccactcatgccactgtgtattagtgtacaacaaggataacagtttctttgtaactggcatgtggggaagaaccgcaaagtgacttctgtcggcagcagctctgtcgtgttttaaggtagtagtcaccgggcagaggtttggtagtgtcctctctggcagccaccgtctccttcagagccctgggccactgacatgccttttctccaagtctcttccctgagtattccccgcacctctgtgcctgatcagacacctcattctcccttggcagcaagaaggccgggtaggcattggagcccttgctgtagacaggataatgggtgaaagaggaagaacattttcatgagaggcatttcagagcctttaaagtggtagaaatcctgtagacaatgatgtttttaaaatcagggatttgcatctctgggactccaactcctttgtttccaagggaggttccctgggccacttggcctgaggttgggaaggggtcggtggttgcggggcagaatgtgatgcttggggatgcaggatggtcaggggcgggtgacggtgggaggagtggagcacgtcatctctccttgcccttccgaggtggtgatggaagctgcctacagctccagctcagaggccgggggtttctggggcccttggtgtggggcctctctcctagctggaggtggccccttcccccttgagaggcctgtgcctgaaatgcccttgtccttttcggccgtctcggccccagtccagtacttaggatccaagatcattttcagctccttccagccaagtctcactttattaaaggagctttgttcggagcagattggataaccgagccgtgactccacttgaacatctgagcagttggcccgcgtgggaaacagcaatggcagagaaagatgcttccctttggatcataccttgaggacaaaaaagggcagtcatataatctgtcatctaaactgggacgcttttgtctggaatgaatgcgacattgaatgggacgtccggacataagatgtaaattgagactgcagtcaccctaggtcagagacatccagcctttattatccatatcatggggaaaaaaaaatggaatgtgattttttttccccaaaacagcttaaaaaaaaatgctaagtaaaagaaaaaaataaaaagcaccttttaaaaaagcaggcctcacataaaatgccactaagacatcaaaagagaagtaaaaccctgctcaaaacgcccacgtggggcggccacagctcacccttgtgtgcctgtgtcccgtttctgctgtcccctttcccaaggacgtactctgccctaacctcaccctgatctggtgactcctccagtggcccatcctatgttcaccagctgggtcctcatctcctccgccacacaggctgctgctctgtcccccagcagacctctccctgtctctggggtgcccatgacccctgggaagtgctgtgcatagttctgtgagtgaggttgacttgttgttttatgcttagaattgtttctttctcctgaaattagatttttctcctctgatgactaggattctattttatttatttatttttattttccacgacctattatagcacatagcacctaacaggtcctcaggaagtatttaccaacagattgcatgaagtgagcccgttcttcctccctctctccttccctccctttcccaccccttcactggaaactcacagtcactaaatatgccatgaagttgctgccttttgcctttgcctgtgttttcccctctgcctggcatctgctcacatcctttctggcagctgccctctcatctgtcagggcccagtttgggtggcaacactcctgctgaggcccctgcccgcctcatcaccccagcccaagaggacagaacactgctgcccgcctcatcaccccagcccaagaggacagaacactgctgcccgcctcatcaccccagcccaagaggacagaacactgctgcccgcctcatcaccccagcccaagaggacagaacactgctgcccgcctcatcaccccagcccaagaggacagaacactgctgcccgcctcatcaccccagcccaagaggacagaacactgctgcccgcctcatcaccccagcccaagaggacagaacactgctgcccgcctcatcaccccagcccaagaggacagaacactgctgcccgcctcatcaccccagcccaagaggacagaacactgctgcccgcctcatcaccccagcccaagaggacagaacactgctgcccgcctcatcaccccagcccaagaggacagaacactgctgcccgcctcatcaccccagcccaagaggacagaacactgctgcccgcctcatcaccccagcccaagaggacagaacactgctgcccgcctcatcaccccagcccaagaggacagaacactgctgcccgcctcatcaccccagcccaaggggacagaacactgctgcccgcctcatcaccccagcccaagaggacagaacactgctgcccgcctcatcaccccagcccaaggggacaggacactgctgcccgcctcatcaccccagcccaaggggacaggacactgctgcccgcctcatcaccccagcccaagaggacaggacactgctgcccgcctcatcaccccagcccaagaggacagaacactgctgcccacctcatcaccccagcccaaggggacagaacactgctgctcctggggctgtagtgggtgtacaagttccctcctcctacggccccttgtcttagcggacttgggaggctcagaggctccagccctgtcttattggtgtttgcaggtccagaaatcttggcacatgacagttgcctggtaaactgccttgaattcattgagtggaacacaatatggtgtgctgtggcacctgatggccagcctggaggaaggggtacttttttctcattgtcatggaggtcccattggctcttcaagcatctctcccaagcatctaggagaggtgcttatttctcattctcacaaaggctctttgtggaccagcacaggaggcctgcctagggcttggatgaaaaatgagcatagagagaagaggttaagggaagcaagctcaagagtgggctcagagaaaagaatctgggggagtcaatgagatggcaggcaaggaacagtctccatttgatgctgatgtttgtgcagaatgactactttataccgtacagaaggagcacacgctcttcttgtggtaggtcccagaaacttctacttgggggtacatgaggcccagctgggattgggcacagaaggtcatggctctgcacctgaccctcaccttaggggtcaggagagagccaaggacacgagtgatgggttagggaggactcaggcaccatggaatactgtggccatccttccatagaggagaggtacaggtggcaaggcaggcaccaggcagccgccgacagggtcaggaaccaaggcaggtccaggaaacagaggccaaaacagcagcaggaacctcaggcttagcagaccactgactcttctggaagtcttttagacgctctgtggtggggcagggacaagtccttggtgtttggccatggtgaagtgtgcagttagggtaggtgagtcgtgctttcttaacacgggggtaaggaaggagggtagagtttcagcagctcctgtttcttgagcacttgctatgtgccagatgtggtttgaactgtttacatgggagctcgttgggtcctcccagcaaagtcctatgtagcaggcactgttgttctttttgcagataaagaaactgaggcaagaaaggtttagtaagttgtagagctaggtattgaaccagggcctaacctcttaacagaagttagttagaggctgttacttgagtgctcacaggttggctggcaatgtgtttggaacccaatgtaatgtcattagattctgcctaaatcttgtgaagaggggatttccatttgataggtaagaaaattgagaagttatcatcagcccgagatcaaacaagggtatagggagtggtgggacctattaagttcagatttatgtgacttctgatgctatgctcagtgatagatctcttcttgaggataaaagtttgagaattagggttcctcgaaaaccctgagatttctttttttgaggggtacctttttgtgttagcagatttaaagagctggccattgtatttgatggtagctgagtaagccttttgaattggagtatcatcaactattactagatttagaataggtatattttgctaagtaagatcttaaagtttttcctttaaacttaggatagctgttcaaatttcaaactcttcttttttcagtaagctggagacatttaaccttttgtcataggcttaaagcagtcattaaacagggtcatttcaatgcaactttttaaacctaactcccctccctttttctctttaattatgatcagtggcttcatttgagcttacctaggatgcatttgagactataaagctgctttcttaaaacttagcaatgttggctgagacaaaccaactgtagaatctcatgctttcataaagaaggttgcaagacattcattcacagttgctcctttattgtgtgtgatgagccattggcatcaaacctgcttgggttgctatcagtttttcttttgagagctggtgacttgcaatttaaaacacacatgggctcaagggtattggagggacatggcagaaagtccttctgctgcctagtgattgagagtgatggggtcctaactctgtgtgaggatagctctttgacacagctcacctcagtcccctttacctaggtttaagttgttagcattttgctgtatttgctccatctctttttttccctgaagtattcagaagtgaattacagacatcatgacgtttagttcctaaatacttcagcccaaacctctaaaaaacaagaacatatttctatataactgtagtactgttctcacaaaattaagactaattgcctaatggactctattacctgatccattatctgaacttccccagctgaccttaaaatgccttttacagctggactgtttaaaccaggattcaattgagaattctgtattgcatttaatcggtgggtctattaagactctcttaacctagaatagtgataaaagctttttactcttggtctctttgcaaactggggacccccagccagcaacaccccacctgggtctcactctaccatgctggggtgccctagctcacctgtgttatagcttgtacctgtgttcagtggttcccgagttcttgcatggcacccaagaagaatgaggatatgctggacattgagggtgaggagggcagagtagaattttactgagcaatggaatagctctcggtggagaggggctgcagtcaggtgcttctctccttcccgtgtggctgggcccagggctttttatgggctcagaataggggaggggcaggctgcaggtagtattggaaaaggcaacatttgattcattaaaaggcattgttcagaaagaatcaatcaggaaagggtgggcagacaggaacagaagttctcgctctggttcgtgggtttcatccgggaccagcagtccagtctttcagccttcaggctgtttttggctcgaaggtggggtttcaccggggacccgcccctatctgcccaggcgtttggctgcttcctatcactatcaatagtccctccccttcaatgacttgtaggaaggttgtttcgcttaccacattccatcgtgtcctggtggcatcatcaatgaatgaacatgttcttttccccatgtttcttgtacgtactgtgtattagaagttggactaaaggcttgatcaaatttgaggcaggaatgggtgaggctacgtgcgactggagggacacaatgactggttctgtcataatcagtgattgaaattgatccctgggtaaatgtgggggcagtctcatccctccactatcaaaaattaacattttttttccccaggtgaccagcaagtaacgaggggaggggctgttttggtactgtatacctgcaaattttaaatattgatttactttacttccaaaggattggaaattttgtttttttctttctttgcccttctttgaaaacattgtacaaagtaaatctccttattttactaatggagaagcttctgaaagaggctgaacatacattgaagtacctttgctcagctgtaagcccttctggatcagaggtcagaccaaagtttgcagacagttggtccctgtggaccagactgaatccacacatgagtttatttggcctgtggagcactgaaacaaaaaaatgcaaatcctgagccaacgtttgggagatcccatattataatacaaatcgagatttccaggtttctggaaggtcttggcaatctagccacactgggcctgcatctgtgcaaggctgcatggctagaggtgtgtgctgggcacacccattaggtgggactgcgcctttctggccactagggaccgtacacctcctgttgttttcatgggggctggtttcccttgctgacacgtggccatgaggtccctcgaggtacaggccggcatttggacttgtcctctgcactgtttctttgttagcatttagaactgacttctcctcttcctcccccattgaggagcagcaccttactctgtgcagagtctgtctgtgatctgcaggctctttgcagagctacatttctctttggaggccttgctgagcagcctccgctgtctagggcattgctgagaatcacaacatcaacactaatggcccttgggccaaaaagtgtttgtcttaaaatccctgcaccaaatagcttgtgcaattactcctgtgagagccccagaggatctaactcttaggctgtttgttctagctgtattccttcccaccccccaaaccgaaatgacattaaaggatagtaactccctcccgcaaatatagataaaaacctctttactccctaacaaccacacaactatttacatttttgtgtttacctcctagtctttaagtatatgaatgcatgcaacgtcctttaaaaatatgtcaatcctagcctccacaccacccagccgaccaggtttcccagagggaagcattggaaatggcagatgggtaaatgcacagagctggcaaatctccatcctgcgggaggcttgctgtgcaatatagccatcgccacaataatggatcttcctaatgatccggaatcactgagcaaagactgtgccatgttcagtatacactaagtgagcatgcagggaatatatgatcagtttacaaacatttccacataagcttttttctctctcccactccagttttggtaaataaaagagcaaactagactgctttctttctctctctcactctccccctgtctccctccctcttcctctctgtccctgtccctctctcctgcctccctcattcactctgtcgtcctgtctctctcctcctcctccttccttccttgcttcatttcccccctcatctctttcttcctcaccctttttaaaaagagacaggagtcttgctctgttgcacaggttagagtgcaggggtgcaatcatagctcactgtaacctcaaactcctgagctcaagcagtcctcctgcctcagcctccccagtagctgggagtacaggcacactaccatgcccagctaatttttaaaaatctttatagaggtgttgtcttgctgtgttgcccaggtgggtctcaaactcctgacctcaagtgaccctcccgccttggcctctcaaagtgctggaattacaggtgcaaaccactgtgtccagccagacaggtcacttttctgtaccattccctgatgttgtgagattagtgagagtccctactgtggaaccttgttcacgttgccctgactcctgatgcatggatatttgctgttaccaaagacacctctgctttaccaaatgttttgacagagtggaaggaaaactacaagacttcttgccctcgttttcttcagtctagaatgatgctggggtcactgagtctgtagggcagagaatctgatgtgttttttaggaagcggaaggtgtctgacacatagatgtttgacaaattttgttaatctggtcagagtgcagcctagaaaattaaattaaaaagctgctgaggagtgctggggtcgcattttgacatagatacaaaggcaccaatagggccaaaagtatgaggccagtcctagggctggtgaagtttggatcccctgcctgacattgtgtcctgagcccctggccccttcctgcacctctccctgagccgccggcccctcctcattccttcctctcctttatcttccgctgtctttgcctgtgcccccacgcccgtgccctgaatctggagtctttgtcttagtgcattctgtttgtctcactgtcttcctctgttttccttttcttgcggggaggaagggtagaaagagtgtaagaagctcaagtatgaggaagggaaggttgccaacttgagatgagtcagaaatgaaagcagttctgaatgtgtaagacaatgaggaaaatatttatttaacaaaaattgaactaccaaccaagccttcaggaacacagccagaaggtgctgtgtagggagaggtgtgcattaggatgctggagcgtggctgccggcatccccaccccaggaggaagggactcgtttctctgaaccttgttaatggttctccccattgtagacaggactggctctccaccccatcctcagtgggtgcagctttggggaggccgtgaggctggtgatcttggggcctcctatgcatctgtgttattgaaggtaacaatgtcccttctacccaaaagtcatgcttttaaaaacgcacaatcttgaatccatttgggaaacatctttggaactccagaatgttgtctttctcagatatgtattgccaatgttgtattacttcatttgctaagaaacattgtcatcgactttataaaattattgaataattctatttgggggagaagcctggaagctaagattttaaaggttatttataagttaagtgaactggcaaattcttaaatggtaaataaaacctttcctacatgctataggtagttatctaaatcagggcctaacaagcttttttatttattttcctgtaaaaagccagatattaagtagttgaggctttgcaggactgatggtctctgacatagcactaaagcagccttgggcaatacataaacaaaggggcatgtgtgtgagctgatggtccacgggctgcagtctgccaacctctgatgttataagccattgattttctacaacatatatatttagaactgggagtgtcagtgttattttgtcatggtttccagattaaactctttcatattgctgctggtcggtcaatgacagactaattctgctagcattgactttctgggccagggaatggggttcctagatagtgcagtagctttttatttattttcttttccattcaagggtaacatgcttaaaatacagcgtatgaagcttttggatatccactgtaaattttaaggtctaaaaatgaatgcaattgtgaaatgtttttgccttagagaaaacgctctcactgctttgtgttataaatgcatgaaaaataatgatgaattaaatgcatacaaacagatgcagacataatttagatgagtgtattgcaattaaaatattgcccactttcgctacggaatattcgttggacttatgaccttagtgtaagtaatgtttaataaggaatctgcaatgtgtaactcctccgtaaattattaaaaggattggcattcctactgtataatatcaacacaagggatagaaaatatgcctggattcttaatgaatgtgtgctaacgttccttctggcataggaatgtgtagtaaatacacttcaagggttgttcgcatttttatccgtcattgttataggcatgttattgtgtgtctcctattgaagaactgattgatcattgttttaagcttctgtgacttttagatgcttaaaactaggcgttcatggtaggaaagtagagaaacatgtggaagaaatactgcgtttcaagtttgggagtggctggtagaaaaatcaaactaggctagtcttatagctttatcgcagttttgttttttttcctagtaggaaaatgatagtattggttgtatattaaaacactctctctgacactgacttgaatcacgtgcgagttcattgagaacagggattttaacttggttaggtgattttaaacattatttagcaaatctggaaaacaaaagagaaattttcaaatatctttcttccacggtggtgtactggctctctggagtgtgatttcatcttctcttattattgcatatgtagtcaagccatcatgttcttgaagtgagacttcaaccactagtggggccgtataattcaggatcttttgtttgtccttacgtagtttcttggcctggaatgtcaaaatatcagaaactgttctttctctggaatcatctgtctccgtgatggcctcgccatctgtacagtcatccaagctagggaccaaagagtcgtcctttactctctcatccttccggctgctgtgtctggctttcagtgtttgtgtagagcaggggtctccaactcctgtggcgtgttaggaagtgggccgcacagcaggaggtgagccatgggtaggcgggcaaaacttcctctatttacagctgctccccatcattcgcattgctgcctgagctccgctgcctctcggatcagccaccagcattagattctcataggaccatgaaccctattgtggaactttgcatgtgagggatctaggttgcacactccttatgagaatctaacgcctgatgatccgtcactgtcccccatcacccctagatgggaccatctagttgcaggaaaacaagctcggggctcctactgattctatattatgaagagttgtataattatttcatcatctattacaatgtaataataatagaaataaagtgcaccataaatgtaatgcccttgaatcatctccaaaccatccaccccactcctccaacccccaaaccagcctggagaaaaattgtcttccacaaaaccagtccctggtgccaaaaaagttggggaccgttggtgtagaggactcctcaagcagcgtccatatctgccctattctctctattcctccacctaggtatagaattctatctctaagacacagacagaccatgttcctgcctgggcaaacacttcggtgactgtgcattgccctgggtgaacgggggtacagaggtctttgtgacgccctgcaacgcatccctctccgagccgcggtgcgctcttcctcctctgtgccttgccggtgcccagaaccacccccttctccctctttgcacaagtgccttgctctctcctttctcaggccagtgctgctgatctgtctgtgtgacccgggtgcacagtccttggctctgtgcctggccctgtgcaggtctctgtggtggcacttagcacatggcgctaagattctccctgataggccttcagcgccgcaagggccagcaccgagtcctgcacatcctgctctagtcccacatcggcccaggggcgttgagctgaggacggctccctaccccgtttctgtgcttggccgactccagcgcccgttcttctgcccctccttggctctgcctccccaccccttggctgaatctctcctcctttcgtgcttgttctccaggtgacttattcaggtccatattttcattacccttgcatttcattaattttctcatttattttattctgtaggtttaggacattctttaaaacatgcaggttctgaattttaataatataaaagtcctctgtgagtgcccatcacattgcttttctgtcctccctacattaaagttagcactgatgcctttatgtttaaggaaagcctcctgcagaggggctctgcccatgtaagttcattggaaggcaggtgtacagcctctgtcacctgaagacctcttaactgtctattccttctctggtctatcgaggtgtattgggggggttacagcaccctctggtggccatattgtcaggtgcatttttgttctagccaaataaaatgataacacaaatcgaatagtcgattggagttctttttcagaggacatcgttaattcacattttgtgtgtttcagcaggtatttaagccattctcgaatagtgacacttatgcagaggagagaatgattttatttaagtaatttctactttttacatagctagttttaaagtagataatacatagtcttaaactttatttcccctttatttctttcttttctgttagagaatttcttaaacttgtagaattatccaaataaaatgccagtcactaaaaaggaataattaaccaatagtgggaaaaaattaaattcttcaaatgaagagtactgtattcatttcatatggtcccagagataaaatgtttaggattcatttttagttttaaatgtttatgaatcagagcttcaacactcttccaggtttctttaagaaaggaatttgtctatctacggattaattaattagcagagcctctctgtgtcaccaagactggagtgcagtggtgcggctgtagctcactacagccttgaactcttgggctcaggcaaccttcccacgttagactcccaaatagctagaccatggtgcatgcaaccatgcccagctaattttttttttcaatttttctgtagatacagggatctcgctatattgcccaggctggtcttgaactcctgaaggcctcaagcgatcctcctgtcgtggcctaagaaaggaattcctcatatagaaaaatattgttatataaatagttgcctatatccatgctgtttatggtaacagctaaggttcatctcaaaagtatttgtatttggctttggaataaaaagaaatttcccctttcatagggttctgagattgtaggagtttttagtatttcaaaaagttaatggaacaatctgtgatgtgaaagagactcagaagaggctagagaggtctttaacacattttttttttgtattgttatcccttccctatagctaactttgtagatgacattgtttttcagactgatgattgtgaccctcaaccatggcagcaacaatttttaatttaaattttttaaaatgcaaggttgggtgattttctctctggatgcttgagttttgtttttgataaaaattctaccaggggcaggggaaagagtccattaagtcttggtgcaagaaacctgggcagattgcctaagtggatatgcatagcaaagaactgaaaacagagtagggggtgctgaaaacacccacagaggaaaatgcggggcggggggtgaatgcatctgctcattttgtaataaagtccttcctttcctttaacatctcttaatgttacaaataccaacaaaaaccatgcatgtcttcagtgggacagaaaatgagggaggcatttagggagaaaaaagtgtcagttgagatgatgttaaaataaagtttattttctttgcagttgcagacattaagatttattctctgggctgttaggacagttcctgcagctctctgtggtgacctgagcattgatacctttttttttttttttttttttttgagatggaatcttcctctgtctcccaggctggagtgcagaggcgcaacctcagttcactgcaacctcagcctcccaggtagctgggactacaggcacctgccaccacacccagctaatttttgtatttttagtagagatggagtttcaccatgttgcccagagtggtctcaaactcctgtcctcaagtgatctacccaccttggcctcccaaagtgctgggattacaggcgtgagccactgcgcctggcctgtgccttggtttctcagatatttctgcccctgtagtgttctatgcactatgcagggaggtcctgactgctcagagcttaaattctgcattcctttattttaagtgtttggccaactgcagaggaaggtaccttgaaagatactccctcttctccctcactgctgggtcccctgtcataggagacctggcctgaggaggcttcttcctggtaacctgggttgtcactgggaccacatcttcccataagaataatgcttcaggttgtatgggagaagcgtctgacagcagtaacttcagcacaccctgagaatggcccttatggcagacacaccggacagcagtcactgaagaaatgagggttgccacatggaggttgctgggaggagggtgctaagtgaaggtgctgtataagctgcatgctttttacaagcagttgaagttctgctgtccagcccagagccactgggccaccctataaataagttcctccaaataaaccctgtgccttgtttgttagctctgggtctcttctttggcttcttcaacttggtgctgtccctgttgaagttaatacgggtttggcacaacacaggagtagacggttacctgtaccctgccagctgtccttgctacaaacatttgcccagagagtggcatttgtgccggttcttaaagtgtttcttgagctgcacattaataggccatgtcctctttcaacctgccctctggctaggtagaacaaacactcttcacctgggctctgagccagctgctcacctgcagcacccccctccttggagatagcttttcatgttgcatcttaccgagttgattgagtattcacttcgaagctccatgctgcacgcatgggcctgtaaatagctttttcgtgcacttgtgggtgtcatttcagatcgcttcatcggatttcagttacccaagtttttacttggttcaccgtaagtttgcaaaaaagactttttgttatcctgaacattgcaggtggaaacatgattaattttgaattatttttgtttaacttctaccctctttcctatttacagcctattttgtttattttaacttccgctgttaagacttctaaggccaggcatggtggctcatgcctgtaatcccagcactttgggaggccaaggcgggcggatcatgaggtcaggagatcaaggccatcctggctaacatggtgaaaccccgtctctactaaaaatagagaaaattagccaggcgtggtggcgggtgcctgtagtcccagctactcaggaggctgaggcaggagaatggcgagaacctgggaggtggaggttgcagtgacccgagatcgcgccccattacttaaaggaagtgggcttgtgttttgtggccttaaggatgtaatctgttggtaggagggaatgagggtgtcctggtaggggtgtctggctttagtgtcaccattcttttaggaattgccatgttgtggggtcacgtcttgtaggagaaacgttctgaagtcatgggattctctaccctcctctcctgctcttggtttccaccagcagcctgcttggtgtggttttgaaatggagcagagatggttttgatgagcctcactggaggtgctgctgagattaccgagaggccttgctgggcacctggagtcaatcatgccgggcactagcatccgtcatcttaggaggtagggattattatcctacctcctaagccatccctggagtggtggcttggagaagttttccagagaaaccgatcagttcataaagtttctgtaaaggattaacacagtgtagtccagaaatgtttgttcatgaagtcttggtttttgggtttaagaaagtgttctcctgtctgggcgtggtggctcacgcttgtaatcccagcactttgggaggctgaggtaggcggatcacgtggtcaggagatcgagaccatcctggctaacacggtgaaaccccgtctctactaaaaatacaaaaaattagctgggcatggcggcgggcgcctgtagtcccagctacttgggaggctgaagcaggagaatggcgtgaacgcaggaggtggagcttgcagggagccgagatggcaccactgcactccagcctgggcgacagagcgagactccatctcaaaaaaaaaaaagaaaagaaaagaaagtgttctcctaagtgctgctcaccctttttcccaaacaggacctaaccctgcgagggagggtgaattaggccatttgtttacagtttcatcagcaccaggcgtgcacggcgttagtcatggtccttgctctcaaggcactgtacttgtagcagcagtatggtgcaaatgtgcagctgaacagtggacacaggttcctggttagcatttagtgccacaggaatgacagggaggtcttaattgtgatcggaccgtgggagctggattaccccagactgtagctcacttccctgtaagcttttggtagggagcttggaattagcaccattagtagaaacagatttcaaagggaatggtacctgttccgtatgaaacactttaaaactcccggtgtccacacgtctttaaaaaagaggcttaaagcagtttcatttcatcaaccccaaactggagaagctatgaatgaccacactgatgaatatgtcctaaaatatatgtatattatataaagtgtaaaaacagacaagcaggaacatactaccagtttctatcacagctacccttaaactatcattggagggcaattaagtgggtacaacctctagctatttggaaatatgtataaaaatgacaaatgcctggttgggtgctgtggctcacgcctgtaatcccaacactttgggaggcctaggcgggtggatcacctgaggtcaggagttcgagaccagcctggccaacatagtgaaaccccatctctactaaaaatacaaaattagccgggtgtggtggtgcatgcctgtaatcccagctactcgggaggctgaggcaggagaaccgcttgaacccaggaggcagaggttgcagtgagccaagatcgcgccattgcactccaggctgggcaaaaagagcaaaactctgtctcaaaaaaaaaaaattaaaattaaaattaaaaagtaaaataaaatgatgaatgcctgtactcttagacccagcactcccagttctgccagttcatgcagcagatacatatgcacacgtacagagaaggatgcaacagatacatatgcacacgcatacagagaaggatacgtatgcacacgcgcacagagaaggatacatatgcacacgcacacagagaaggatacgtatgcacacgggaacagagaaggatgcacaagaacatacattccctagttgacggagtcgcagattagaaacaacagaaaagcgtccattaaacaacagtttgaacctgtgttgagatatcagcatcccttctccttctctcccccactccctctgccctctgcaggttttattctcagcctgattttctccattggatgtcagccctaggctggcatttgcagagagagatggtggctcctgcagagcttacggcctgtattttattgggctgtgttgagttacccctgatgtgagcaggagaatgggatgttctgtaaattggcctctagcccatcgtgaattcatattttttttataatgtgtgagtcacactcccttctgtcttcatttccttttcacactcccagcagatcattctctctattctgattggcattttatacatgaggcagcagaggctgagacctactgtattttgagacactgtagctttatatggcataattaaatcatagtcatcaatcactcttaggaggtaaggattattattggcattttccagatgagaaaaatggaggatgagaaaggttaggcatcttgctgaagtcacagcagacttaagtgccggagttggagctgcattccggtatgcttgcatagactctcttctcatgctcactgcacgccagtcacctggtatgctgaggccctgcctccaggccttctgattcagctggtctgcagccctggcatttccagctcctcaggtgattggaatgaaagccagagctgggagccactggtctacaccaccagtaaatgatcgggttctcacttgatcatttaattaagaatcttggttttctgctttcagtctgagaactcttgttcatgctctcaggcatgtcttcacgcaggaaagtgatctttgaaattaataggtgcttggaaagcctttaagcagcaggcagtggagaaggccactcagtaggaagggccgagcatgaagcctagtgcacaggcttttcaagaccccacggagggtcttcagaaaaatgggtttcctttgtctccgtggcttccagtctttgttggccagcagttgtctgcttcaaatgagctggctctagaggggcctggagaacccagaaaaactttgtgacaacctgacaagtttgtgttaatcttctgggcattggctttctgcacttattgctcactgaatcactgaaccaggcaggtggggtactggagggcaggggatgggtaagaagggcagcctttggaaggaaaatcagcagagggcagggaccggggaagaaggagtaagaagggaaacccttttcttaggttcttataaatcagaagagcaataaagaaaaaatttaaatctaaaaaatacatgattaggatttaaatccagtatgcttcactacatataaacctttgacttaatattttctgtagtagatgaaaataggactttttttgtttcccttctcttcacatggtattgagtttttttgtgttctgaatacgtgttaagattaattatgaaaatcaaattaccagatacttgaaatataaaattagtaatattcaaagacgattaaatgcacgatttccttttctcataaaaaaagaagcagacggaacttgtattctgaaagcaaatatggaaatcacattaaaaatcagaaaatcctcaccaccgccccccacccccatgtgcatttcatttctctttggtctgagttcaagggagagagaatatgaatgtgctgctagctcaggaagcttcagttctaactttctaaagagctgggaatgtgcttgagtctctgttatctcttgtttgcatttttcgctactttgcctccatttgatccagggaaaacttcatggtagggatgtgagatgtattttgagggctaaaagaaaggagtttgaacaaaagcaggacagtgttccgaatgtggaagcaaagagtccttccaaggggatgtgcggccaacgcctctgttcagcgatagtccagctgagaccaggacctgtgcctgatgcccaggccaccccacaggacggtcctccagcacctcatttctcctttcatcagacacctcttcactggcctactgggagaaaacggagatgagtgaaaatgtgcatacagaacatagggctcaaagggaccctagcaccagtggtgctcaagcctgtcccagcattagcgtcacctgggagctccaaaaacatattgttgccaagactcagtccaaagcaagtgacttccttggcctggagtgagatgtgggtggccagggtcaggaaccaccgagtgggtccacctctgcagactgggaaacagagtctgggaggctgcttgttccctcaaggacctgaagtgacatggggaggcaggactagccttggggctcctaattctgtcctggcctgtattccagtgtgccgtggggcacgtccaatttgaatctggccccagtacactctcaagccctgtgttgctctggtcccacagcttctgcccttgactttccatataacagcacattggtggccagggctttgcactaacctacctgcctccaacattgtttttgaataatggaagctaagcagatgcatattaatgcctgcattatggagaagactgtctcttcacaagtaatctgtagttgttagtcttgaaagtgggttaattcattgtctttctagagaaaatgattgcatggcctaatagtcttccagttagtctgtgtggcaaggtagaagccaggagtggattcttagctcctgttgagtgctgctgtcctgaatcagagatcttctctcccgggccactttgtcatgagcaggattttgaaccaagaccttttcttcacctgtctcgggggccctcaccgtgggctttgtgatcccctgacagctccaaaagcctttatcctcatccaatatctggtgaacagctgacacctcctgggaatctttaaaattgttctctaaagaaaccattctgctgcaagtacctatttttagactttataaagcccacgtcaggttgtcgctgcctttctctctgtctgctaagcctgctgtttgaaaggcagcaacaggatcttttgtctttaaaagttcagccccagctggtgcattccccacttgaactccatagccctggtgtgctctggggtacgtctcttccaaaacccaaaccacaggcagtgacctttacaccccaggagttgaaataatacacctggaggaagaaaataacttacaaacaatgagcctagagtataaatggctatgttttaaaaccctcgattttccttgggcgtatttaacctgtacagctagactgttgtgagttttgggctctctagggggctgtccaagttcagaacaagtgcatctgctggcagccagcttaaggagttagcagccctcaattccaataacgaacgtgtaaatcagaattcaggtgtgttgaagtggggccttgcacacatcctggtcagcccagggtgatttcctctctggccagtggttttgggttttttcttcacatgaactcgtctgttgtaactaatggtcactgagtgacttcagaggtagtgatagctcatagtgaagcccgtgacccacagcggtgggcacacctcgatcccttctccttttcctccatccccacctttctctccttacttcatcccttcctctttccacattgggtcatccagcagaagtcaagtatcttctatttcatatctttattgaataagagttttacgatccatgttattgaagtaggtaaatggaatctcttatgtggaattctctaaaaaagaatcaaaactccagtcaaaccaaaccaagtattccaaatcgtttttagggaaaaaagatataattagaaaagactggagagggtatgcaaactattaacattatgttagggtggtaggagtataagttatatttgctttttctgaatttctaaattttcttcaattaacatattgttcaaagtatcaaatacatagaaggaagagtgtgcatgcctgttatctagcaaacacacttcatgcaaagaaactctcctaaggaagtatgaagttatattttatccttatctatccaaagagagtgtgtgtgtgtcatatacctaaagaattagttattaagatgaagcattgcttataatgaaaaagttgaagcaccctaaattagcttaataatggtatatctttataatggaatagtataaagccattagaaatgatgttacagataagtatttaatgttatggaaacattttataacatagaatgaaaagtaaattgtagattggtttgtataatttgatctcatcttaggaaacacataatacagaaatatagatgaaggtctgaagggtattaatgccctaatgtattagtagcattacctcagagaagcaggctcatgagtgtttattttcttttcttctaactaagtatgtatatgtgtaagtgtgtctgtatacaggagatgtacatacacttttcttgtgaagaatctgtattgcatttactactggaagggtttattttagatttagatattaaagttacctctttgagtgagaacctatgatttatacttcttagcttaccttttacctccattatttaaatctgtctttttctgccatcaaatagaagatgtaacagtgataaaaaggctgggtatggtggcttacacctaaaatcccagcactttaggaggccaggggttcgagaccatcctgaacatagcgagtgacgtagtgagaccccatacctacagatttttaaaaggttagccagacgtggtggtgtgtgcctgtagccccagctactcaggaagctgaggtgggaggattgcttgagcccaggaggtcaaggctgcagtgagtcatgaatacaccactgcccttcattcagcctgggtggcagagtgagactctgtctctaaaagtataatattttaagaaagaaaaaacaaaaactagtgataaaaagaacttacaacaaactgatttttaagtggactgttgataattataagggctgagatttttaattgccatttgtatcaatgaataacccccctgtcaccacattttctggtgtgtttggtgtgtctggttcctataggagagacagtaatgctatttgacatgctttattgctgattagaagcctaatctctgtaatgggaagctcagtaatgaagcttgttcagaattgtgttacagtcggttaatgaagctctgagatcaagggcctggcttttgatggcccctatttcagaatccagaggtttgtttctatttatttgggttttgcaggtaagttccctggactgaggtgatctgaaggttagctctgctataataggtaaattgctaagaaaaacattggccttggtatgtacaacttaaaattttattggtgagatagtcttcttacaaaacaatcacgttaagctagaacttggtgtataaccagcatatatactcctgccaccctcagtgtgtagccaaagttctaaattgcatgcacagataacaggcatataattggtgatttcagaaaagttatacctggtgggcagtgagaggcgagccctgatctgggaaaccccagtgcttcaaggggaagcaatctgggaaactccaatgctgggattgggattcaatctgggaaaccccattgctgacaaggtacatggtacaagcttgataaaaacttgcttaatgtcacacttgtaatcccaacactttgggaggctgaggcagctggattacttgagttcaggagtttgagaccagtctgggtaacacggtgaaactccatctctacaaaaaatacaaaaattagcctggtgtggtggcatgcacctgtagtcccagctgctcgggaggctgaggtgggagaatagcttgaatacaagagttggaggttgcagtgagctgagattgcaccattgcactccagcctgagctacagaaaataataataatttaaaaaaacttaatgatgatagcatttgagttggcttttcaatcctggtttcctaaatatgtgagcctggaccattaaactgtgtgacaaggagctgtcatcttaacatacagacattaaatgcattgttcaagatcagaaatgatttcttggttctgaggcactattgactgtgtgtaaggtgccatcgttaatttggtaacaaggggagacagtggcagggaagttccttttgcctgtcttgtgataggcttcctattttctcaaaggttaagatattaaattgtcttaagcaaagaaggtatttaagggcatcatcagggttagttctcaggtctcctgactcctagcttctctagtttagtgattcacgttagcctttcaacagtttaccactcactttaatggtttttcctagctgtcttgacatgcttttcactgcttacatggttagtttcctacctagctgaatgcaggcatctgtgctgtctgctgggttcgctggtggtgatgcagcccacaggtacctgtctctttgaggggagttcagcaaccatctatttatgtcgaaaggcactgtactgggagatgaagaacacggagttctaggcctccaggaatttatcatcacttgctaatttgagctgagcctggcacttgaacataggccatagatttccagatgtgaaaaaaagaaagaaagaaagaaaaggatcctttaatgtatagacttgtctttctgcctgctttcttcacttctgatcattttaaacaattgatatcctagtttgatgtgatcatgttccaacacagcacaacagcatgtatggtttggggcatgcacctgtggcagttgcaaaggtttttacagtgaagtggctaagaggagagtaagaccagtgtatagggtgtggatgaggtcagatgcgagactatttcttgatttgagtcattttatttaggagctatttctttggaatactttatatatgagaatgtacatctgattggaagacagaaggtactgaaatttacctcttgatcaaattattctggtataaaattaaactaaataccaatcatatacttaatttcacagacttgcaaataatatactggggtaatggaagtaagagacaggaccttttatgtggtatgaagttctgtgataattcctatcttcctttgtacctaaaagaggcaccctctcctgtcatactgcaaacagatgccactactacgtgtagacacatttgccagctgtggcacagctggtcacccagccctcatcacagctgcctgtaaaacccagatttattctcttccccctgatcttttttagaaattactggtatcgttttagagagtatccaacttacacacaccacttaaataatgaattttccaatttcttctttttccacggccttcacgtcatctggtaaatattcccctcaggttggcatctgcttctgagaccctgctggacctagatatattcaccagagatgggtgaaggctttggaagagtgaagtggttaggaacatttcttccgatatctcctgctcattgtttttgacctctctgatttccagtatattctctgctccagccacacagctttcctgaacagctaagtcttgctcaccggtcagggaccagctcaaaggctgtccctttttaaatttatttcctgggtcttctcctggcctcttccctgcactcggtgnagatgcctgccccatggttttcagtagcgttggctcttagctgttccgttctggggaaggattggttgttttccttttctccatgtgtgttgtgaatttcattctgtgtcacngcatcacgcgaggtgggtagggaagagnacttttacgctccccgctgtcgttagtggcctgattacgagtctgtgggaaagaatgaaggttggaaagaagatctggtgggaaagaacaagggttgtccttgagcagccaaactaagctgtgagaatgttaatgtaataaagcaggaattctaatgggctgcctgctacagaggagatgggagatggtgtagggctcatgactgtaaaagcaggagccaccagcagatggtgatgcggcctcttggcccaggtgggactctgcatctccccctcccatggacattcacttgataagtgttgggccggtcacccatgccctggtcgttcttatcttatcgaagagtgctaatataagtaagctgtaaattcccattgtaagaaataattgccttttaaaagggagcattcaagaaaaagaccttttggctcaataaagcctttattttcctcaacactcttggctcttaaaaggggcctgttcttggccttgaagtgggaatttacacagaactttaaacagaagaaaccccctctgccttgggctgcaacttgttgtccctggcagggtttgggctgtggggtcatgggatctgtttgtttgaccgttgtatgcaaaaatgattttaaaattggcctccctaatctgttggagacattagttaaaaaaaaaatgagagtaaagaggaaaatattttgctattgggtatgcactggatccatttttaaactgagagaaggtgaaaggggtgactggttgatttcggataatacttttagagccacggggaactgtgaaagacaagaaaatgtaaaaaaagcacattgattgcaggaccggtggtccaaaagcagcacgtgaaagaggtttcaaggctgtttctacaaacaagaatgccaaaggtggcataggacaagaagcttgctggatgtcacgaagctagtggagatgggatccaaagctagttttggctgatgaaaatacaggctcatgccctgtatgtgaggacagtgggacagtaatttaaacagaagtatctagaggagtttccttattgccttgaatgtatttctttttaacattgctatggacatttaggaaaagatgccactgatattccaaaaggggcattccatacacctgagagggatccctgaggctccagggtcacctgggccaagccaggtatacacacgtctcatggcaagttggctgttatcataacttccctggtgttgttttgttgcaagggcagcattgtggggctgtggtttgaattgcttttttgtgtctcttgaatacacgaagttcctcctatagtcattggctctgctgcctctgatgaggcacttccgtgttccccacatttgaatttgctcccgattcgagagaggcaggcatccgcggcagcagcttccaacccagacaggcttaagccgcgcgagggtgcccgggtgggtggctgcgcagggccctacctgggcgggagcggctgcagagccctgtccangcggtgcctccccagcacggcacctcccactccaggctgttggttacctggccgggagctggcngagaccaggatttctcctcgccgccgttgctgttgttaggggaaacagaccatctgcatctagacctgcctctctctccgctccccacttcagacgagctcttcctgcctggaatctggtaagtgccaccgaaggttccgttccctttattactcgattagtgcccacagcatcaggagaaggttctcttaccgtgaatccattagctttaacccaaatgtgcaggattagggggattatttgaacttgcttgctttctttttaaaatgtccattagacattttttgcatgcttcaaaatcaaaaggcggcacagtgaaaacattttaattatttatgtatttaacctgtatcatcttgtttctaacctcttttcttcagggtggtgcagtcaaaaattacacagatattgctctggtgcctctccccccttttatgaataaattactgcatttgtcatcactgtgttcctgaaatgtcaaaaatagacactgtaaaggaatctgtcatgcagagttcagaaattttcaaatttctgagttcaaaacctcaggtgaagcgaggacagatcttttatttaaaatttgattctttgtaggcttcactgtgaaataagttcaatttagagcatagctaatgcaatcagccagctcgtgatgggacaacatacttctctattgttttacattcacctcctgggatacacacactttctcatttgttttataacctttacaggaaatacctggggatgagtcacatgacccctaacttgagtttttacatgtattcacccagattaaatgattttgctcttatatggataaacgtgcagttaggaactttaaaaaattgtaaatgaggtgcataatcattactcattgtcttttactgcattcttcagccctcaaacatacaaactgttattccctttaagagaaaataaaactggcacttatgttttcctttactctaagttaaagactacccatgttatgtgccattaaaaaagatgtagaaattaatctgtctttttctttgacctaatcttactagcagggatattggggctctacttttctgttctctctctctctttttttttttttttttttttttttttaacatcagccacaggtaatactctccggtaaacatataacttgaggaaaattgaattaggttaatgctggaatagaaaaccagggcagtgcctgctctttttggataattctgtataaacaatgagaaagtctcaggctgccttagacaaaggctgagacgggagctcctgatgatttttatgagggggaagaggagatggtgaggaggagggcaccgagcatgtgcagcaacttgaagcatgtcagaaagaacatttgccagaaatcttcaaaaccgtggcggtcggtaatgtgtgaaattgaacttctgaccctgtttgcttgatggcgacttctcgttgtgcttgagaattgtgtggcattgggtccctggatgtgggaggaacagcaaagtggtttagtgaatagagagggaagtgccttcctttttgggtgggacttgccatgatagagcctgggccgtcaccttaaaaggagatgtttctgttgagagatggaaaattggcaagacaaacgccataaaccttaacctgtttataattccttacctgtaagctgctttgcacgcaaggtgatggttctacctcataagggacaaggaagaacagcacataaacctgactgaatggagtgtggctgtgggtgggagcagctttacaagaaggaaacggggccccctcctgagacacccccgtttgcttctgctccttccttgccattgacgtgcccttctcctgaaactacccacacctgtgtttggcaacaagcggctgccccttgatccagatgcatttttcaacttgcgaactctcacctcttgccaagggacccaagtacctggttaatgatctttaatgtaaatgatcctttgccttgattaacattgagctgggttagtatgcacaggccgagctccgtggtcctcccatgtgatcccttccctgccagccacctgcccacctgtaggaactgggcatggccagttttctctttatgtgctctctttgccttggatggaatttgggctgagaccgatgaggtggaaccaaagctgttcagcagaagagagcaaccacagagcagcctgttgggtggagggcttgagggttcctaaaatccgaggactttctggtgagcctctcccctgagcctgcttgagggaaggcgctgccccacacactctccagtgggtgggggtgggggtggcagcggctgatcaaaggttctcacctgcaagtgataatagcctgggtctctttggcaccaacctgccttcttcacctttctgctcagacaccccttggcacccctacataaaggaaagagctgtctggatggcctagtaactgtaggataggtaaagttagccctttcttctgacctagatatgtgatggtggtatttctacatgtttatgtcgagaactttacaaagatgaaagaaaagctttcagagctgcagaaatgagaggtggcccttttttaaaatttattttaagaaacaacttttaaaaccactttttgaaaaattggatggcaccgtcctgcagcctatcagatttcccttgagaactggggattattggcttattccttgctacctccaatcccaaattaagcagagtgacatgtaagaagctgggtacatcagcctaaagcgtttatcaggtatgtccttcccaactggatcttttctactccctggcccgaattttgttttagggaatggggcctattttaattgctggtggcaaaaggatccctgggcagtgtttccatggtcctctaaggtggagtgtcggggagctgggggacacacagtggtcatgggttatctgtcttggcctctttcccagaccaagttctgtctcatgcttattggtttggctgctagttatagaatctgatgtttaccttagaatcctaggatggaaagggttaagaatgatttctaatttgaattccttgtttctagggagttattaaacctatacattacatttattattttacaaagcactaattcataatagttgacaggaacaactattttttggcttctttgtttttttgtttgtttgtttgagatggagtttcactctgtcacccaggtctggagtgcagtggcgcaatctccgctcacagcaacctctacctcccaggttcaagcaattctcctgcctcagcctcccaagtagctgggattacaggtgctagctaatgtttgtatttttagtagagacggggttttgccatgttggccaggctggtctcgaactcctgacctcaggtgatccgcctgcctcggtctcccaaagtgctgggattacaggcatgagccaccacgtccggccttctttggttttcatattgattatattttctaagacaaatactcatttatatagtctaataaaaattgttaaatctaattaaacaactaataaaaatagttgtttaatccacgttgacatcttcttacattgcgatagaaattttgatatatttatccatatgatgaattgcttaaagccggtggttctcaaccagtggcagttttgccttctctcccacaagggacatttgacactatctggggacatttttcattgtcatattcaagggagtggggtgtgaagctggcaagcatctagtgtgtagaggcctgggtgctgctccactttctacattgcacaggatggcacctgacacacagcctaaagcgtcggtactggttgaccgtatacgaaatgctgtggaagaccaggcacggtggctcacgcttgtaatcccggcactttaggaggctggggcatgaggattgcttgagcccagcagtttgagaccatgtttaagtttaagttcatttaagttctctgaagtggtgattctgatgctatatagatgaaggttggtttgttgaagagctgactctggtatttcatccaacatctgcatttttctttagctaaggatgccttgagaaacattctagtctcttaggcctgaatttgttattagcttaatagctttcctctggttgaatttaaatggaaagaaaattgcatcttgcaacaggaaaaagaacattagggaaaaactgaggaaatggaaataaagtgtggaattttgttaataataaatcaaccttgatgcattaattgtgagacatgtcctgaaccaatgtagatcttaataataggggaaactggcttcagggtacgtggggactctatcttatctttataataattctctaagtctgaaacaaaaaagtttattaaaaaagcacaaacaaaattgctgccattttgttaacagatatagtagtcaatcttactgttttctttttctttgaaataggctgctgcaaaggtatgttctttgttatctcggctctctgctcagggtagccatgaaatggctcttttaaaaatgtgcccagataattttgaaccatttcaaaccatattatgtgattttaatttattttccattgcattcactaactcatttctgggtgatgtatttaaaagactagacagaatttacaggtttaaaaagttacattaacagaaaatgtaggtgccagttgaaatactgtcaactggaagtgctaccagcaatgtgctagctggacaatgggacttgtcccatttttttgctgggtgacagctatcactgcctcagggaggctggtgccatttaatgcctctgataatcagaataagtaattgtggcttctgggtctgtaaagccacaaaatacatatgcaggcctattttaattgacggtaagtcatgaaatacactattttcgtattaagataacgtggatatgttatggaacaaagttaaaaattagcatgaatttttaaagtactactggagattgttggctttaggttcgtgaaccccattcctgcccccacactcctgttagtggggctaccagaggggccagtatgaaaagcactggacttacagatgaaagaacttgagctggaatcaattcgagtcacttaccttcgctacaggtgggcagaggagtcatcctgcaattttgttgtgaaaacagaatgagataatataaaatgtatttgaatacagtgaggtctgtacagatgctgaatctattactttgcagtaggagtcaggtgtggccccacttccccaccttcttacctacttgtatcttagatcttatatatattgatattcacttttggtggactaaggttgtctttgttgcaaacctggactctcttgtattcttgctcagtgtgtgtatgttaatgttagataaagaagattaggctggtgcattggctcacgcctgtaatcccagcactttgggaggccaaggcgggcagatcacttgaggtcaggagttcgaggccaccctggccaacgtggtgaaaccccatctctactaaaaatacaaaaattagccaggcatggtggtgcctgcctgtaatcccagctacttgggaagctgaggcaggagaattgcttgaacccaggaagcagaggttgcagtgagccgagatcacgccactgtactccagcttgggtgacagagtgtgatcctgtctcaaaaaaaaaaagcagaagattatttggaaagctatttttaaattattcttcaaacatatactaaaatagagaagacaacatgagagccaacagcataatgaaaccccatcactcagcctcaaccgttgttaacagtttactatctttattgctactgaaggcagttaaatatttcttggcagtccttttttatttagcatataccatcagggatgacaatagaaacaggtttcaaagtcaggtgaaataatgtttctctatatgagttcaccactaacttgatacacagtttatgtttatgtttatgttcttattacgttcgtgtattaaggcaacctttcatccctgccccctaataggtaactgtctttatttgttctgggattatccctcctccattgccctttttggaaagagtatggatatatttgtattttctcttactcataaagcagcacatggtacatactgttctgagccctggttttctttttttcacttagcgttgtatactggaactcactcaatgtcagtatacagagaattcccttgtctttttataactctgtgctatacgctgacggaagttcattcagtcagtcccctattgatggacacttgagttattctcagacttgtccattgttttgcaaaaatagccctgggcatatgtcatttggtatttttgtcgaggcattccaataaaaataagtaaattcttcctctcttgccttgaagatgtgcagctcctcagtaaccttttattctctaaagctctgtcctcatctttaatccctgatttaagaggtgcagctcttcaggccataaacctttcttcctgcctcaagtttttaaagctacaaaggaacctaagagatcccttgtgttttacagctaaaggacctgagagcaggaaacaaagggagagccggaagcccaggtctcctgttccctgcctggcaggtgatattctttctgttaaactctctttccctctgcctattattggccaggctgtcctccaggacagtgcttgccaaagtgtggtccatgggcagcagcatccccggagctcatcagcaatgtaagatgtcaggccctgccccagaggggctgagatagaatctaccaattactggattccctgggtgactcatgcagtcaggttggagaagcgctggactggtggctttctccagaggagcatgcaacagcggtttgcaaacagggatgatgcagttccttttcaacacgtggatttgcacttcctcctggtgcgctcctccagcctgcctgtcctgttcacaccagcctccccctggaaggggttcagacttgatcctttgggtggtagggtctttcttggatagcgtagccatccattcctgctgcatacattcaacacagccttcatccttcgccatttgtctctgatacttcatactccttttgtttgacaagtgccctagctttatttattttctcatcattgttgttaagggcctattgtgcttgctagtatacacaccactatgtaagttactagttcaatttatttgttttactgctgctgtgaggtgtgtccatgtgtgcacatctacctgtgttaataactgataatattgggcctcagtacatactttttttttttaagagacaaggttttacttcgtcacccaggctgaaggactgagacacacttgtagctcactgcagccttgagctcctggacccaagtgatcctcccaccttaacctcctgagtagctgggactacaggcacacaccaccacaccaactaatttttttattttttgtagagacggattcttactgtgttgcccaggctggtctagaactcctggcttcaagccatcctaccacctcagccttccaaagtgctgggatgataggtgtaagccgccgcacctggccctcagtgcatacttagatatacttaaataaaaacttaattgcaaattacttcttaaattatccacaaactgacttggcagtaaaagtgactacaagtagtgaaaccactgtcataataaaaataaaataaaagtctttattgttagatttagtatttctaatctcttacatttcagttttggaaggtaaatttttgggaagtggtggtaataatctaagtatgtctagattcagtgatgagagctagtacactgtaggaaagagttgagcataacaatatggaatgttggtaaatgtataggggttttctttttaaagacagctttttatacaaagaaacagatgatctttttttttttttctaaactatgttagctatacccaaattagtaaatgttaaaataaccatgactggtaaaaacattttgcaattttttttttttttactttttatataattaaatgaaattctccatttggtagttgatctctcagacaaattaagtcttgccagactgtctgagaagactagtgaatcagaccctaaaaacttgtagcatttgaaaaataacaactgtgtactgcaatttataagggcataattagagaaagtttttcagtctgaagatttatactaatcttatcaccctggttttagagaacccagttcaatccaactgctgtgaaaaagccactgcttttagccacagaaaataaccagtttcatagaatgacttataataaaaaattcaaccattttgactccaaaaacctagctggccgggcgtggtggctgacgcctgtaatcccagcactttgtgaggccaaggcgggcagatcatttgtggccaggagtttgagacctgcctggccaacatggtgagacccccgtctctactaaaagtacaaaaattacccagacgtggtggtgtgcacctgtaatcccagttactcgggaggctgaagcaggagaattgcttgaacctgggaagcggaggttgcagtcagccaagattgcaccactgcactacagcctgggcaacagagtgagactccttctcaaaaaaaaaaatgcctagctgactttatcatagatctgtctgtaccttgtaggcacaaatatatttacaaaataattaatggtgatttacttattcacaataagcagttattttgcttttggtgtatatgtgacaaggtggttatgtggagtacataaaggagtaaagtaagtccgttgacttcaagatgcttacagtctaatagaaaccttgaaatttccactgggcaaggttttcttgggattgctccaaccaaatgaatgagcaggcgtctaagtaaatgaaaatcactctcatcactttccttcacattatgttaactggtgacaggtcatgacgcatgggaattgcttatgtttctgagctttagtcttgtaaaaataagtttagatagtccatcatgttcttcacattagacactcattacataaaaggttttatatgtattgtagatctttctgaaggtcatctatgtgaatgtttaaaaaagaagcaagaaggtgctataaaaagcactagaggtcaaatggtttgcgagacaaaatgaaactctccagctctgaaatccaacagagtatgatgaagaaagggaaaaaatagatcaaaaaatggcaggggaggaactcggcatcaaaccagtgataaagcagaatgtggatcagatccagacatccagtagtctgtgagcatctccatatgggatgtttgggttgagagttcaacccatcaaatacattttatccataaccataagatattctaagatcgaccaagtagagtaagcaatgtagaatcaaaggtatcatctttattatgtcctatttgtgtttcctgcttttgaggttcttagtccttttaattaactcctaatgaactaatatagttttgtggtcaccagcttctagctagtacaggcacagttgtgggttggtaggagaatgagcagtaaagccatgagctaacacaccaagtaatctgttgtgttcacaaatgtccaaaagaataacagagattaaagaaaggtaaatacagccacctggcaaaaatatttacccttttaaaaatgatggaagttatatatagaagaaatgtttttggtaaaaatatttgaaagtttgttttataatcataagtagcttgggctattttgactagaggggtgtgtgtgtgtatgtgtgtgtgtgtgtgtgtggttggcagggagagaaggagggaggcaggcagctggtagggactgtggagtgtgtcagttgggagagggaaatgagatgattaagttagtaagaatagaaaacatgtaggaaggcggatcttgaaatttcagggctattcattagtcattagttgaagatttcacagagaaatggtagaaaccaccagtaattaagaaatagcattattgtttaaaaaaaaaaaaactcccaaaccctttccctggcattctggtagaatatagttttggtctaacccaggtcccctctcatttcctttcacatccccttggttctagccacgctagactgtctgggttgtctgtatatgttctgatgtttgttttcctctgtgctgttcttctggcctcagaatcctagtgtccttgtgcctccttctgcatatgtctggactttgcttagctgatgagatccagttcagataccaccttctgtacaatggcttccttaattcctttaatttctcttaattgcaataaagctatttgcagaggaatgaaagatgctcccctttgcgctgggtacaggatgcactgaaactttcagcatggggcgcggtggctcatccctgtaatcccagcactttgggaggccgaggcaggcggatcacctgaggtcaggagttcgggaccagcctgaccaacgtggcgaaaccctgtctctactaaaaatacaaaaattagccaggcatggtggtatatgcctataattccagctacttgggaggctgaggaaggagaatctattgaacccaggagacagaggttgcagtgagctgagatcgcaccactgcactccagcctgggtgacatagcgagactccatctcaaaacaacaacaacagcaacaacaacaaaaacccaaactttcagcaggagagtagcttggttcagcccagcaacatcggtttgaagattatatcaagttttccagtcaaatgtaaccagtttatggatctgtgtttgcacggggtctgaacctcccctcctcaggtataagctcttggaggacagcctgctgcttaaggtacaggagaattcatctttgctggacatggtaacgtatgcatagagatctggcaacagaacttaagatatgtgggagaaataataggcaaaaactggaaagagcacaagtaagagaagagaaatccgcagaagtgagaagtaacagaattgctggctgaggttggaggcatttaagtgtgtgggtgtttgtgggaggcatggtggtctcctgttccttgacctcattgggcaaatattacagcacgaacatacaggtaggaatcaattgcatccccacctgggcaccttcatcggcagttggggtacaccacttgctacagtgtgatggaataagggacgatccaaaggcactcagttctcccacccatcctgtgcacaaggaaaagacctttgaattgtgtctcccctgttgtcctttgcattgtgaaagtgcatattagttctcccatccactcttttctctttaagctttagcatacggttgtttgccaagaatggaatcagatagaatattttcaccaggaagtgaaatttaaagtgcttgaaaaagatacaaggatatctggaagttccaaccggcgccattttatattttaaccatgacaagtagctgtatatcatggaactttggaaaacagagattgttccatttatttttcacagatgaaaaccagagtgctgtgtggggatcaggaagagggaaatcaaccaaatgccttattttagagattttttttttttttctgggaaattggaaacagcgcttgtttatagccaatgcagcgtccttgaaactctcctacttacagttctggagctgtagtttcctccctgaagaatgggttaaggcaggcagggtaatatgcatagatgggagtgagagtggatggcctacagggttgttaacctctagtgcaacaggaatatatgaaggtacttgggctggtggtcctgtgcagaaccagccagtaggttctaagagacttgatagccgagggtccctgggccctgttccacctttttaaaatttctatgacttagtagcggcagtaccatgcccatcccccagtgatgtttggggtacagctgcacccttggccgtgcctctgcactcactcacgagtgtcatctgacatctggctcttgaccaggatctgaggttgcttaagcaggatccaggtcaggttttttgttcatggaaggtggaattttggacctttcccccaaaaagttgacataacttaaagagaagggaggtatattgagaccagcctggccaacatggtgaaaccctgcctctactaaaaatacaaaaatagctggcatggtggtgagtacctgtgtagtcccacctgctcaggaggctgaggcagagaatcagggggcggaggttgcagtgagccaaggtcatgccactgcactccagcctgagtgacagagtgagactctgtctcaacaacaacaacaacaacaacaaagagcagagtggtattatttcctcactggaacattaaatggttcctactaccaaagagttcctgttctaatgggggtttaatataatagtaacattttattcactgggattcactcgggggaaagtattcaggaacaaagtgacaaaattaaatataggacatatgaacattgtcattttggttctagttcttacaagggcttatggtagcaacccaaatagaagtatttgctctaactaacagataaattattagcacttcagttgtttacatatgagtcagagcatctaaaatttgttcccataagtaggttgagcctccttctcagcctgttgtcatagggtctaaaaatggaaacgtgagtccaaactctttccagatcataaaaataattctgaattagtagagcataaatgaatgtgattttattcgagtgtcattttcaagttccccaggccaggttgagaccttttaagtcatctgaaattccctgtagggaggattaagaaaatagtagcagctttgcttctggccttagacagttttctaatgaggtcagagcctctcaccctgggagaagcagattcactttgccccttcagcattggtttttgagaattgctgtctgaagctattgcatagacaaggtcactttttaaaagggtacatttctgaacctggagaaggagtgggttctgaatgactggctcttctgattaacagagctgtatatcaagctgtgctgaaaatactcctcagatatattaggccacatttatgcatgagtgagctcactgtcgtgacatgggagtgaacctttgctgattcgagatcctggggtgccttcactttggaacactgattctagatatttaatagcagttttaaaattaggctaaatgtagtctgactgcaggattcattccagtgggaatttttttgtttgttggttagttttttaagcctgaatatgaacccaaacatgtttcccaaaatgtgaaatgaagagtgaaaacctaacaatgggataagaaagataatagataagagattatagttcaaactcggcctgcactcaggaaatggaagcaattcctccccctcatcctgcccccctcctcctccccccctcctcctcctccacctcctcctcctccctttcctcctcctccactacttcctcctcccccttcatcctccacctccacctcctcttccacctcctcctccccctcctcctccccccctccccctcctcctcctctccctcctcctgccccctcctcctcctcctccacctcctactgcccccctcctcttccacctcctcctcctccacctccccctcctttacctcctccttctctttctgcacaccccacccccgcccccactagggacagtttactcttccccctcctttcttagaatgccaacaactagcctgttagttccattacttacttgccttgtgactcataacgttttcatcttgggtatttttctttcttggtctttgtaaaaattctaagcatcatagagcatatcacctggagaaaagacctacgttcattatttaatgaaggtaaaaagtaaagaattgagtctgcatcctaagaaattagaaaaagatcaactaagtaaacaaaaaaatataaaaactaggagggaggaattaggagatgataagatttaaaagttatgtaaatccaatagctggttatttgaaatgaccaataaagtaaactctcattatcctaactcaggaacagaaagaaatcatcctaacttagaactagataataggaatgagaggccgggcatgatggctcacacctgtaattctagcactttgggaggccaaggcgggcggatcacctgaggtcgggagtttgagactagcctgaccaacatggagaaacccatccatactaaaaaaatacaaatttggccgggcatggtggcttatgcctgtaatctcagctactcaggaggtgaggcaggagaattgcccaaacctgggaggcagaggttgcggtgagccaagagcactccattgcactccagcctgggcaagaaaagcgacacttcgtctcaacatcaacaacaacaaaaaagaaagaaatagataataggaatgagaaaggagacacaggagatatcaatagactttataagaaaacattacatgcagccctgtggcaacacatttgaaaatatagggctgacttcttaggaaaatacaaattaccaaagttgatccaagaagcatggaaaagttgaatagaccaattactatagaagagataggaaagatgattaaaagttaccattgagaaaggcaccaggaatccatggatttccagctgaggttttgtttgtttgtttgtttttggagatggagtttcgctcttgttgcccaggctggagtgcaacggtgcgatctcggctcactgcaacctccgcctcccaggttcaggtgcttctcctgcctcagcctcccaagtagctgggattacaggcatgtgccatcatgcccggctaattttgtatttttagtagagacggggtttctccatgttggtcacactggcttgaaaaaatagaaaatttgagtgttatttttactcttccaggacatactaaaacatggaaaggttcccagttcattttataaaaccatcaaaattttaatttaaaaatctgatgaattaaaaaaataaaaataaagatcaatattatttatgaaagtaaatgtagaaatttaaaataatttattaacaaatagactcttgggtgcatcaaaacacgaatgcactataatcaatagttattttccagtaacaccagggtgattaactgttagaaactcatcactatcatcagttgttacacaatcatattgaaggagaggaatatatgaataagtcagtagaggctagaaacctatctgaaaaagtttagtagccattcctaatatagtacaatctgagaaagcgaactaggaataaaaataaattacttaaacataaaggccatatatgtgtacacaaacacacacacaccacagcaaatatttcctaaaagacaaaacactaaagccattcaattaaaattaggaatgagagaagaatcttacattttacaattagtatttaatattatcttagaggttcttgtgagtggagtaagacaatgaaatggtcatatgtctagaaatcgcaagagcatctagtaaaaaatctaaaatcaacagaaacaattgtcaaggaagctggataaaagataggtctctagaaattatcttttctgtgttttgaagataagcacctagaaatggaagttaagtatttctttcacaatagcagcagataacctaggaagacattgaactaatacctgtaaccttcttagtgaagaatgtgaaatataatctagagaaattaaaacatgtaatgcctgaatgtatcttattacaaaattaataagtaaatttcttgtgattccggttagaatttccaaagtggtgggttttctctttaattgaataaaataatcctgaagtctttatagaagaataaatacgtactacctgagaggagccaagacaaatatggaaaagaaaaccggtgagggcagatttggcttacaagtaatgacaacatgctaagaataagaagtcttcgtgatcaaagcaatgtggtattgatccagaattacataaatagttcagtggaacagactagagaatctaggactgtgtctcattaagagagtgaatgtataacaagatgatagttcagtactgttgaggttggtactggcataaccagttctttatctggagagggggttgggggaacagcacagacctctatctaatatcataatcagtaataagtcccggaatcttcaaacacttaaatgtaaacaagcaattcaacttttacaagaaaatataagaacctattttgtataatcttggagtgagggagaatggttaagcaaaatttgatacgcacaagctataaaaagagacacactttgaacatatattttatttttatttgtttattttttgagacggtctcactctgtcaggctggagtgcagtggcgcgatcagggctcactgcagccttgacctcccagactcaggtgattctcccacctcagcctcccatgtagctgagactacaggcaagactcactgtattagttctcatactgctaataaagacatacctgagacggggcaatttagaaaggaaagaggtttcacagtttcacatggctggggaggactcacgatcacgggtgaaggtgaatgaggagcaaagtcccatcttacatggtggcaggcaacagagtgtatgcaggggaactcccctttataaccatcagatcacatgagatgtaattcactatcatgagaacggcatgggaaaaacctgcatctgtgattcagttacctcccaccgggtccctcccgtgacacgtggggattattacagttcaaggtgagatttgcatggggacacagagctaaaccatatcagctaccatgcctagccaattttttgtggagacgaggtttcaccatattgctcaggctggtctagaactcctgttctcaagtgatctgcccacctcagcctcccaaagtgctgggattaacaggcatgatccaccatacctagcctgaatatatatttttaaacttttctgtggcaaaagatacgtgattaagtcatagatcaagaagggatatttgaaacagacatggggttactatctataacaaaaaacttacaaattgttaagaaaaccacagaggaaaaatggacaaagaatgttaatatagaatacacagataacaaatgcagacagctagctggcaaacctatgaaaaatagttcatttttgctagggaaatgcagattaaacaatgagacgttactttaaacccatcagattggtaaaaatagagaaaaataacactttttgatagcaaggctgtaatagaagtggcaagtggtattatttctcataatactgatggaaatgtgaattatgggcagttgggaaattgaaaagcagatgggcaatgtatattaaaataaaaaactatcatacctttcttctaagcaacctttgtcctcggttatttgtcttttagaaataaaaaatgtgtgcaaagtcatatgtataaggatatttattgtaccattatagtggcaaaatactgaaaatatgaaaacccatcagttgaaaaacggccaatttatggactgtttgtaccatgtaatattatgagagaactagagctgtatgagagttggctgtggaggaatttctatgagaacttgatgaatgagaagcaatgtgtagaaaaatgtataatatccagttctaaaagacgcattcctcctgtgcccatatgtgtaaatgtgtgagtgtggagaacaagatgaaaatgctcattctgtatgttaagcagggagtggggtggaggttaatgtggaatggtgggagagtggggtggcagggatttccaagtcactcaccagtgatgagtgttaaccacatccccatttttttcctatgaaggaagctgcaatgctgtggtttgaggttaaacatgctggctccttctcttaggtcttgatttggtttttgttgttgttgttttttttttaattctagtctgttcttgttttgctgtgctgatatcctcttagattttacgagcatattaattgtgagtatttaacattcttctttggtttattctgagaccccgtttgcctgccctttggcatcattggcagtttttggtggtctactggtcttcctgtttgtgcctctcgtttgcccctttttcactggaatgtgccaggttgaagcaatatgtagggcccggtgggatgggccaggaggtggcctttcagatgtggctcctgcatggccctgcttgctctcttgagctgcctgcacttcagtcttaggaccacattcctgctttggcctacatgaagtgcaaggtagcagtgggaaaagcagagaggaaatgaagcttcctgataaatcacctgatcgctgccccagggttagtcactctagcccccttggatctcttgactccatctcttgatttgtttcttttgaatttctggcatctggagaatacttgtacagcagcagtcccctggttttgtttttctttcaacccaagcccatcccatatctgttcatgtgatgatactgtgtcttattttcccaagattcttatgactgtgatatttagtctgaatcagagaaagagagagatagaaatgtacactcagagggccacttggatggaaacttctgttgatctctccaagccttagtgggatcatctgtagagcagggataataacagcgcctatctgttactgttagggttactgcaaagattaaaataggtggtgctcttaaaagacttagaacagtgctgtcatatagtaaggattccataaacattagctgctcggtttgtgtgtgtgtgtgtgtgtgtgtgtgtgtgtgtgtgttttgttgttgttgttgttttaaacgggatcatgctggaaatgatagattgcaacagagctttggggttttttctctaattaatagatctaggatgttttctgaggtgtgtcatgtttttaaaactctgtggtatttctgtttctttctttctttcatttttttttttttttttgttgttgttgttgagacagagtctcactgtgtcacccaggctggagtgcagcgatgccatctcagctcactgcaacctctgcctcccaggttcaagtgattctccttcctcagcctcccgagtagctgggactataggcatgcaccaccatgcctggctaatttttgtatttttagtagagacagggtttcaccatgttggccaggctggtcttgaactcctgacctcaagtgatccgtctgccttggcttcccaaagtgctaggattacaggcgtgagccaccatacccagcctggtgtttcgtgatatatctatgtgtgagggtttctgtagttaagttcccatagttgaattcctggttcaaaggacaagaacatttacaatgttcatagacgttgggaaattgccttctgtagtactgcactagtttccactggctgtagtggttgatgagagtaccagtttttccctagttcaatattaacccattttatcagtcttttcatcttcgacattatggaaggtaaaaacatctcattttatgtcttcagtcagtgatgccaagtatctcttcgtgtatttatatttccatttttatccagtgccaactcacatccttctgtcaatttttcctttgacctattaatttttcattgataagaattctttgtaaaatgggcagtttaactccccatctgtcatatgttttttctcatttgatttattgtatatcttgtatagcaccttttaattttaacattgtgtttttaagtgtcttttctttgttgacttggaaagctaacaactacttacagcataatttccttctgttaaaaacaagaaggaatttccccactctaattgtgaaaattatacatttttctaagtctgaaaaaaaatagaggaaaaaacagaaaaaacaacagaaagaacatcagtcactcttaatattttggcattttccttttagttgttttttaggagagaatgtatatttatacttcgcatcataacatagatatagtctattttggtgatttattccaatatgtaatatatgtttctgaatgtacaatatcctatttatcatatctgttaagtttgtttccagtttttcatttaagagagaaaggtactgggaatatctttgtgcaaaacaagaatttttttttttttttagtcagattctgttcctatgatacctccctggaaatgggattcctaaattaaagaatattaggatttaaatacttttggtatagattaccaatttgctttcctaacgtgtggtactagtttatgttgcaatcagcacaaagactcactgtgccatttatcatcagcagagaagagagcagccctgaagatttgggggaggagtgttcgtagagaggcacgtgaaagtgagtttgagaggtttgagaagtagccaggtcagtggggctggggaagggagagagttcatgggggagggctggagatgaaggtaaaggagccatggttctttagggctgtgtgggtgctggggaatttgcatttcctgcttaaggttgtagtaagtcagcctggagagttgcaagaaaggagtggcttggtgtgatttattgtagcaagtgagagtgacccagaggccagttaggaggctgttgcagaggcctgagtgagagaggatggtttaaacaccaaaatggtaacattcagaatggagaggaggagatggtgggagattaaatttggggatggagcccttaggatctgttgattgactggatgtgtaagagagaaagggaagagcagaactgaggaaatgtcctcttgaactggctgggggccactgagatgggacagatgcgctggggagcagtgcagaggtggaatcactgctccttttaggtctaaggcatcccttagatctccaagtggatgtgtgaagatggtggtagaggagaatggagctcaaaagaggggccagagtcatttccatttagatggtctttacagcctaaggaactggcagatttcactaaggttgaggtctttctttcctgtgaaaatgtgatcaggatcctaagtaacagccctaaaaattaaacattaggaatacaaggtttcataaattaggaactgtctgtagctgccagattctaaatgttttgaggatacaaatcttggggtcttttcaaatgctttgagcagaagaggtacatcgtattgtgtttactgaatggcatttaaagatgcaggagacctttcccccttcttgatgaaacaatttgcctttcagatgttttgttatagtgagttgattgtaggaccttatgaagcatgtaaaccacacatttgtaaggcattggaagaaaaagctaacgcgagttaggagggatttaagaccatgtgaggaaattcaagcctatgttgttatcaccaaaccttgcctgtgttatgtaaagatttttgcctgtgtcatgttatcttcgttgtgttcaatttattcctccccctccaagtgtcctagtttctcctctactgtagctggttttgaacaaaatagagaaacttgggtctcctctaccctcagcatctgaattcttctcatttggttactcactgtgttaaaataagtgatatagtacattcttagcagtttgtttatttttaattttattttttatggggctagggtctcgctctgtcacccacgagtgtggtgccatggtgtgattgcagctcactgcagcattataactcttgggctcaagtgatcctcctgtcttagccccacgagtagctggtattacaggtccatgccaccatacccagctaatcttagcaatttttaaataacttttttttccgactgtaacagatttagatattggaaaagataaaacataaagcattgatctacctgtagagccaaatagccacagggatataaattggttaccatttaattttatttccatctatatttggctatatttatatttatgtatatggaaatagtttatgaatttggaatcatactatgatattttttagaatgatgctttttaaactattttatggtaagcattttagtaaagctcgtaatgttatttttaaaaacgtacttttcgaaggctgcagagtatggataaattcatgatgactttttagaggaaaatatcaagatgatctcactaacaaatcctgagattaaaaacaaaagcaaacaaaatacaaaaactgaaccatctttggaatactatgaaattcagattttatgttcttaataaaatcctgttttgaatgaaatcagtcttcatgcttttcttattccttttggctatgttgcctacagttgaattaactgtttttatatacttcctttgctttgcattgaaacaagctgatccattgtgaccctttgtggtatttcataaaaccacaccctaaaaactgcccagtcttttaagtgtagtcaacagtattgagcaattttttgggtaatattgtcggaagtgttaggtgccaaccaacaatggcttattgcttacatttaagtgtaagcaatatacaattaaaggaatgtcatgactttttaacttcattttgaaatttgagtttagaaaaaattccaagggaaatgagcaagaatgaaagcatcctctcctactgccagacttctgggagacccacccctggtcttcccaggtgtctcttcagtgaccttgttggtcgttgagggctgtggaaagttctagggaggctgctcgtccctcctctccttttgcttattgcattctgcccagattataaaactgaagtatctgtcttaagacgccagcagctttttcttcatcaaatccagacacatcgaatcccccacaaccaagaattacccagccacaaaatgtcagtagtgccccggtaaaagaaagctggttttagacttagtctcagaacctggccatcttccatggattatcccgatatgtgcatccttgtctcttttcactatagcctggtgatcatggtggcagttttcattttgggacactggtgaggttagaatagcttcaggcttccctcagtgaatagtattgtgaaggcagtggtggtaacattgtgttggagctggtgtgagggttgaatccactctgtagcctctgtccctagatcatggcgctgctttgattgggccctaattttctcctctagacaaaaggaattgaactaagacttccagcattccctccaggcttaacattttttcatttggtgctgatggtcactgactattttccagttacattttaatgcaagtttggcagaagccgatttctctgggttagggaaaatgacataggtggcagggaggtggatgtacaccatttgtttgatcagtttgcctagaatggaggtggcagaattggagttggaaagatcaaatgtagcctttttttcccttccagaatgaggcttttctatgcatttttttgaggcatgagaacctcatgggacaaggcaaaagtgagcatactcaagtgaagtgtatggttatgggggaatggttattagaaatgtcaattgtctcaattttttagtattaattttcagagggaaacagtggtgtaattagtgttgtgattgtttgccagggcggtcgtaacaaagtagcacagactgggtggctcaactaccacaaatttgttttctcagggctctggatgtccggagcctgcgatgaagcaggattggcttcttctgcggcctctcttcttgacttgcagatgctcctctgggtcttcccaggtcatttgtgtacctgtgtccgtgtcctaatctcctgttcgtataagggcacagtcatattggattgggacccacctactaacctcattttaacttaattacctctttaaataccctctctctaaatacagtcaccatctgaagtattaaagacttcaacttaggaattttgggcaaatacaattaagcccatcacaatcaggtaacatttggtaggacgtgtagatgctttttatctttaagggaataggcaaatcgttaaaaataaataaataaaaacttgttcaacttgtttaggtacattttcttatagtgtattgtggttcttatttttttaaccttccagctagtgtgtaaattggaaacattgtagcttaatttgatagttttagacataatcaaagatgatggaaatcttgttcttaaatttagtctattcagcaacttgtgtatcctcaactgctgaagactgaaaacttgagatgttcctcttgttttaagaatttgactgaaaacgggctgggcacgatggctcatgcctgtaatcccagcactttgggaggccgagatgggtggatcacttgaggccaggagttccagaccagccttggcaacatggcaaaaccccaaaaatacaaaaattagtggagcgtggtggctcacacctgtggtcccagctattcaggaggctgaggcacaagaattgcttaaaccccagaggcagagactgtagtgagatcgtgccactgcactccagcctgggtgacagagtgagaccctatctcaaaaaaaaaaagactgagaatggttggcactgtccccctgtctccaggagggtgaatgtttctagctgaaccctggtgcccacttgctcctctaagccttcagcagtcctcccagcctcaaggggtgatccgttcatcttccccccacctctggaaatcccagcgtttgaacgctggggggaactgcaagtctagtttacagggtttctcagctgagatgccaggaacacttcgcgagtgagcatgccaccacatttgagtgcatatagaaagttagctgtttgctacaactggggacacttcctattagagccgcatctgctggggtggagggctgcatgggttggagagtagggtgtgacttcttccagcaagaggaaagagaagtagcatagtgcccatcgcaggcagagagcacatgtttgacttgctcttggaatttctgtagagtaagggtggtcaggttgccagactacccctcaaacgaggacatggtgctgctgggtcccagggtagagctctgctggcaccttcaaggccctgatttacacctaagggcacacaactgggatctgaaaactgggatgcacagtacagactgcagatttacagggcggggctgtctctcatctgactattgattcttttgggggctgtagtttgtatcatagttatttttgttcctgtttttttcccctcttcaagacaataagcttttggagggccaggaagttgtgttcccatctgccgagtgtggggcctcgagggccagaacctcagaatgtagaagctgagttagtttgtggcagggtgaagggctgacctctactgttggaaatgccaaaatctctgatctggctttaaataagcaaaacagccccgccagacatagagtcatccacaaaacctcatgacctctgttattgcccatcctgtgtggaagcccactgagaacttcacttgaagatgctgcaggaacaactgcagggaacctggagataaggccccgggtgatgatgtaagctaattgctgagctgggtggagctacttaaccttatggtaggaggtggagcttgacgcaacccccttttccaccaacaagcatttctttctacctgtcattgaagtgaatcatcagtataagtagcgagctgggcgcattccttctcagttgtgttaaaacttgctggtattcccccggtatcagcagaggtgtgtacgggcactgctttaaaactgggaaggaggaagacgaggccagggagccggagggtcaccaaggtagatttccagcagcgctagtccagctgaacactttccagccttgtttttcagcagctttgaggaaaagtataggtaagaacaaagacaccactgtatgtttgctatatgaatgcataacatctgttcttggtgtgagtttgatgttggtttaatactgtttttatgtcagcggcatagttctagcatgtaccaagattttcaattttaaatgctttttggtgttcacagttagctataattggtcaattttaccctccttatgcataaaaagaatgataggcaaagaatgagccttgaaaagaattgggatcagaattctggtcccctgttctttgcttcttaactttcttgactgtttagaaaaatgtacagcttttcttccaaaaaccaaagcaataatacttttatttttgaaaataatggaaaacagagaccgctgaagttctatgaatgaggttttctgttttagaaatcacaggttgaggaggaaagaattgtgttttccttcctgttctgtttcgagtctcagtatttctgacttagaaacctcctggagaagagggagataccagctctcctttgtttcaagtaaaataccatcttaggtcataaaatagtttgcttggagaataattcatggcttatatctgaatttttggttggtagcaacagaaatctttctcttcctcggtatgagtaatttggcttacatgatttagactaaattttattatattttttgtttgagaaaacaaaagtcaaagcccagaacatattcaactgagtttttccctcaggttttctatcattttcccacccttcctactcatacatgtgaatatgctgaatgattaacatgtgatttttgtttctttactgtctcatttcatggtgattcataaactgttagttaactggttatagtgtatccatatgttggcaaagcttgaaataaatttgagtgcaggccacaccttcgtattaatgagccgggttactttcagtaaagtatttctgatgtcattaagtgttaagatggccggaattctaaagacaataaaaatgtatcaacaatatgaaatatcaaagcctacagtcaaatctgagttattctttagtacttatttcatagctattctttaatgtttattctttaatacttatttcacattgaaaagtactttacacatgtttgaatgagatattgccagtgaaagaaacaaaaggaagcaaataactctataagggaagtgggattttaaagtatgtttgtgctggccccaggctggtgagtgagtttcattagcaatgaccaggaagagaaagaatgccacagtggtgggtgctgaccttttttttttttttttaaaccttttttaatgtctgtaaggaatacaaggtgaactttaattcttgtgggaatctagtaagatggaagtcaagaagagaggaagaaatgctttttatttagttaagaggaagtaaacatctgtattagttacagatgttatgccttaacctttttcattcctattgtttttatgaaaatttgcctttttaagttaaatgaaggttttctggagtcctgtattgcaactaaatgttgatttaaaacgacacatttgggacattttcttggcactgtggaatataatgaaaagatataaaatgaaggcaggtatgaaattatatgaattctgctacttgagtgtagaagttttattccaaagtggtttgtttggtggatgtggtgatggtggggggctctatgtacttattaaggcaagtgatgggacaggagcttttgtggtcttgacggttctgttgggatgggagggttgtttgggatttttatgtttcattccaggcaatgtttattttttcagcctgtacttcttagggttttaccaagtcagttttcatgtgaagccattttcatatcgtttctttcaccttgatggaaatcttttccttcttatgtgctttgagttaaatatgatgtagtgtgctagtaacatagacggggctttcctttctacaggtgggcttgaagtgagcctgccactcgctcaccttgaatcacggaggtttcagaggccgttggccttcagggcaatggcagaagcacatgttctctgctgttttctgagtctatcttgactgcgttcccagtggcccagaattccccaagggtcactcgacacaccctcgtctacagtaaatatttgtgcttcctctgtgcctggccaggttttctcagtacccaggagcacaggtgggcagtgggatgtgggcaggcggtacccagattccctcccacaggggccacagggaggacttgggcgcttcctgccaagagccccctgcccttcagactaagtggaaatagagatccgggagtccagtggactcagtggagttccgtagaatacatggaaaacgcaccgctttcagtgatgtaagctgtcttgttcacttcacgattactcatctggcctgcagcaggcaagaggatcacatgcaattataaacagcctcctctgactaaggtcagtgactggaaaccctgtcacgttatcagaggtcatttggtcatagattcttgggcagaagccattgagagtcctgggggtgtgatctttgagcctttgccagtgctggggtttgactccttttagctcaattaactgggtccaggagtttattttggccgagatctgccatgctgagttgacaggcttgacactggaaggaagtctctaacttcattagaggaaatggcgtggcaggctttaaggcattttgatatactccactttttctctcttgccctgttttgttgaggttttcagggccataactgtacctgaggttaatcagtgagtgatctatctgaaaggaatttgttctctttgggcaccgtcctgtgtggtattatatttgtataactatttagcttaactcattcaaaaggctatttaagtcacttgtcctgttcattacttgaaaacaagttgtcttctctttattcttttagtcagttaccaaatatttcctaagtgtctcttgtgctagacattgaggggcactccttctccctttcacttgtctgtttttgttgagctacattttttccttaagtcagattgttcttttcctgttacttttgttttcacttgatttgtttatttatatttaaatatgtactttaacagtcttgaagcattggtctgaatgaggatggtgatcagattgggaaaatgccccttaattttggtttaaaaaaatttattttctttaaattatttgtttattgataggggccacccactccaggtgagtggtttctctgtgtgtatggcagaggaatgctctgtgtctggaaaaaaaagtcacttagcttgaaatattatgaaagctgaagagtacaaatgtcagagagaaaggggtattgggggggaagagaatgagaagacaagacacagtcagggccctgtcacccgtgtggaactgcaggtccctggagagatgatgcatttatccctttttagagatattgccattaaaagttgatcttgagcatgacacagaactgaaagctttgatgacaaagccagcatctcagtttagcaataaccaggttagggaaaaaaccccagaaactcaacagtgagattcagctcagcaatgtgggcggggaacccactgtcccgccttgggcagggagcagccccagccgcttcatctgcctgatgctgggttttatccgcttcacaattaaatttcctttttgttatgcttgcgcacatctatatttggctttgcttcttattttttaagaaaggggagaagtgtgggcaaggtaaaatacagcttgcaagctcccaaatggcaaatgcaccagttagagtctaagtggcctcccaaccttaaggtgaaattcatttattcagcaaatatgtaccaagcccatcagggaccactgctcgagataccagtgcaaatagaagaggccaagggcacattattaggtccggagccagtggcctgcacagccatctgtgaccacctacctctctgcttgcagggaacttcagcctggtggaggagacccataatagccaagtcaactgataatagaattagtagtagtgttgagggacataaagaaatcagggtaaggccatcacaattacatgggtggatgatcttttataaaacagcacagttttgttttcttctgccatggtatctcctaacattttccagtgtgtctacttgcagttaatatggaagttgcggctgacactaggttagtggttaaaagaaaacaagaaaaccaacctttagaaatctttagaaacatcattatcatagaaagctataaactcttatgtatagaagggtaagtggccattgatcttggagcagaatgaatggatatttcctggaaaaaaatatttccactcatcaaagatactcaagtctcttctcatctaatcaatattggaaactaggaatatccacgcctatggaatatcctcagagagaattaattattctgccctctaagaggtatagtagtttagacttagaagtaaaggcctgaacttgaggctgcaccattgaaggcaaaagtgccctttatctcccagctttgtcatttgccaaatgcaattgtgttaaattaagtgacctccaatagcagagctctatgttttctcccctgacccccaagtcaaaattgattatagtaatccatcaaaccaggcctggcaaatgatgttttgcaactaaaggataaatactgagggggagggacgaatgtgaacgcatatgcagagcaacacagtcatgagaccattctattacttcctaaatttcttaaagcttttctgtcttttctgagcttctcaagtgagcaggggcatgagttcctgtgttgtgcctggggacagggaaggctttgggacctactgtggtcttaagtctgagcagtgctaatagcctcggctcaccaagtgctgggcactgtgctagagggtgtacaaacctctcatctcatgaggcctcactgctacagctgacagagatgacatccagttgtttttagttgcacatggcagagctagaaaacaaaccagggtgtgtcagactccagagcgcatgccctctgtgatgccgctgtgttaccctagatcaaatcaaccaagccatccgttaaaaaaaaaaacctgatctttgtcaaatatgcaattgttatatttttgttagagtctgcctctccagtgaacgatattaatttccttcaagtggctactcacagatatcacaaaatcagaaagctgcctaccctgcagcctgtatctgcctccacgtccccacatcagtcctccttgctgtgcttcttgtctctttagtttttatcatcttctaacactgtgaactttagtaatttattctggattgtttgctacctgtctccccttggtaaaatgtaggctccgcagaggtagagcgttttgtctgttttcttcactggcatatctcaggtgcctaaaacaaccatgccagacatgtagtggtgccagtgacaacttgttgaatgaagaaatgggagaaaaaagcagaccccggagacttaggagggtctgtgtgagggagtctccaggcagtcttcctgggggtgtcctgaaggacctcctgatcgtgattttggtcagtgtggaggctgtggtttcttctgagctgtcagtatttggaggtgagttgtctgcaggtcacctcatcccacctttacacattagtaaaatggaattcgctgggtgattcttaggactgtgcggtcagtcgaattaccagacgtccctgcatgctctgtctaagggctggagtctgctttccttgcttctcttctagaaagaggtctgtccacaagggattagcctcgcgaagttcctactgttgttcattgacccagtgagtgttttacccactgtgggtttttcctacctaattgcccctctggttttcagtgttcaacatgctgcagttacgtgttctgctgtggttttacttagcttaatcctttattaattgcctcttgttcaaactccctaagagcagattatccttctctttcagcttctgctccattgctgttgaacttttttttggtcgtgacatcagaaaaataaccaagtgtgagtctgataatagcaagtaaggctattttatttctatccaatttaccccaaatttgagcagtattacaccttaaaataatagagctggctcttgcccagcatgtgaaaagtgtatgcttcacgatggacagatattttccagtatctacttaccataaatctcaagatttaccctaccccactccagccattacccccatgtcccatttgcctaacctaccctagggccatctcagtgccctgtaaagcaacctttgttgcagacccactgtgtgactggaatgtgatgcacacaagtgaccaaggcatggccctgttcgcaaggagcttccagaccaatagcagaaatggacacataagtaaacaactgcgctactgataggcttctgccaacaggagtggagcttgagggccaggaagccttcccagaggcactggagcttgttttaacgttacgtgcatgccaggtggggggcaggacatttctagcagaggagaaagcatgctgtgctctgagaactaaaagtcatagtcactccacttggtgacatgtataaggcacatggaatagggccagagctgggcagaccgtgtatgccacaatagttcgttgtaggttacaaagaaccagtgcagagtgggtgaggcataggctatttgattaataatttggctgcattgacaagatacggaaaaggcgaggttgggactttccgtgaattttctcctcaaggtgcttaatcagtgaggttgggatggccggagggggccctcatttgcttgcctggtgctcaagcctgaggtcctggcctttaatagtcagggaggtctgtgtggaggcagggtgtgagccccctccaaggaaagctgcagtgtgaaaagaggcccaggatgagcgttggggagtatccacatacaacttgatattcctaaagtctcagttctttatgggaaagcccatgcactcttccacacttggaattctttgcaaagtgagtggtatttgagcttctttagagtcttgctactcccaccagctgtactggcatcaccagggagcttgttagaaatgcagattctcgaggcgcggctcacaactacccaatcagactacattttaaccagatcccaggcaatccctgtgcacgtgaagtgctagaacactgctctgcggtaaaacgactttgctaaccatggaagagggtgatttttttcccttttcctttggtgttttttataggacctatttaccttttagaactttttcagaattatggactgcagaatatatacagtgtcaatgtcattagcaattcattagtgatatttggctagaatacatagttgtttccacacaaatgccatttcttacattgagatggcacatgtctggttaggacttgggctcatttgtaaggagccacgctgcaggtaggcatgctcccgggacattagttgctcaggtttcaaactgctgccccagcatagcagatggcacggtaacaaagtccctgtgcactctcacattgcctgcggtgatctatcacacattttgtcccctaataacctagctgggggggagctcatgtctctgtttgtgctaatgctcgctgtatccccaagtggcagtacttaatataattgtcattgctctttaatattatctcattccacgtcagctgcacaaaaatttgaggttaatcacaatgaatgttttctcaatccttgttattgagagctgtttaatagtttattttgtatgtgaagattcatatctagattgaggcttatacaacttcatttaaagacagctttttcggctgggcgcggtggctcatgcctgtaagcccaacactttgggaggccgaggcgggcggatcgtgaggtcaggagatcaagactatcctggccaatatggtgaaaccccgtctctactaaaaatacaaaaattagctgggcgtggtggcgggcacctgtagtcccagctactcggaggctgaggcaagagaatcccttgaacccaggaggcggaggttgcagtgagccgagatcgtgccactgcattccagcctgggcgacagagtgagactctgtctcaaaaaaacaaaacaaacaaacaaaaaaggaaagctttttcaggttggaaaaatatcaacagcagacatgaaaaagcatgaaaaatgacgctaagaatgtaagcaactggaaacaaaaattataatggtgcatagtgagctgaagatctatatttaaatgtgaactcccctttcagtttataagtgattactaacagcctcatcaggtttctggaattaaatgttttattatttcctcccaaagttagtcctcaaacattagtatttcttgtgttcttttgatttgaatatttgtttttaacacacaaggatatcaactctataagtcagttaatatgttcatgcttttagttaatcgaaagtggcttatgatttcagtttttggtatcaggtgatgttgcggaagtgaggttcactgtgaagcttcttctttttttttttttaatcattttgttgtttctttgagtgtatgtgagcttataactcaagacactatgtgaaatgaccctgtgtttcctacattatagaaaagaggaaaatgaagcaagttcaagaaaattagatttatgtggaaaataaattctgcatctagttattcattatcaggtatgagattacaggcatgagccactgtgcctggtgacctcatttgaactcgattacctctgtgaagaccctgtttccgaagaaggtcaacattctgaggtgccattgtcaggtatgaggtaaacacactgagaataccacattttggcaactcagacaagactattttccaaacatgtaaccctgggaagaaggtaacctatcatagtgtgtgttaagaagtcaagcaaccaagaaatgttaattgaaggcccgttttgtacaaggttgcatggaaaagacacactagcgtaagacatggacagtggccctgagtgacgtgcagccggtttaggcgaattaagatttacatacttgaaaagggacaaacaagtctggacgtggtgactcatacctgtaattccaacactgtgggaggtggaggcaggaggatcccttgaggccaggagtttgcaaccagcctgggcaacatgggaaaacccctgtctctacaaaaattaaaaaaaaattagccatgtgtggcagcatgcccatagtcccagctactcacaggggctgaggtgggagaattgcttgagcccaggagatccaggctgcagagattgtgccactgcagcctgggtggcagagcgagaccctatctcaaaaaaaaaaaaaaaaaaaaaaagaacagaaaaggaacaaacaacagacacaagattccatggaaaagggagtggtctaagtattcagactgtaggaattcagagagtggagaggctggttattatgggggtgcttcatcctggggagttgagggaaaggaggtgctggctgcctggagcctggaagaatcaaagatttccaaggccatggggggaaagcatgaaggatgagtgaatagacaccagggctgagcaccctgaaaactgtgaagatactagattgacctgtttggaaaaccaaacagatgtggctgttattgacaagtggttttgtttttgttttgagacagagtctcacttggtcgcccaggctggagtgctgtggcttgatcttggctccctgcaacctccgcctccaaggttcaagcagttctcctaccccagcctcccaagtagctgggattacaggcatgagccaccatgcccggctaattttttgtatttttagtagagatggggcttcaccatgttggccaggctggtctcgaactcctgagctcagatgatccacttgccttggcctcccaaggtgctgggatcacaggcatgagccactgtgcctggccaacaagtggtttaaattggattctccatttcccacctaatagaaagtcggaagcatagggcaaaagtaaaggaaggaccctgtgttctgctggttaaatataacagaggtctgactccatggctattataggagaggtgcattttgttctatgtaaattatcttgatgtgtcccctgtgcctttaccccatgattatttagcacttttttctccacggtcacagggacagggagaaacatacacccataaaacagtgtcatctagaggcaaaaacttgtaatgctcaagcatgtgctctgacgaggtggggcagggtgtgtaggaacaacactctactaattattacagagcttgctctgcactctctgtagaagtccttcaatatccagtctaacacacacagtaacttaagagaggattttaaaaaatcaaaatgccctcagatttgtattggatttaaccaggctgagatccctgagatccaaatataataatgtgtcctttttggatgaatcagacacaagcaaaaatctccagtgtgtgtccagctttagaggtgtagtaatggattccacagttcacgctggtgggccagccaagacttttaatgctgatgtgggcttcattctttctataaactccctttcttcttgatagtgcatgggcccaggggttccaaacatgggtacctgccgtaattgatctgtgtaaccggagaaaatacatatcctatggcacccttgtgtcgggatatagggggcatcaccgtaatgtggctctttttctgttgattatagttttttctttctgtgatcacacaattgttttatcctcgcttaaaaaatttcaagaagtgcagcactcagaataacagaaaagtcaggtgtctggtggtttgtttgcacatttaatagacttgaagataaactctctaaacatttattttgcaagttgtttttctgagagttgaggggaaacttttgccctttggtctccctgaggaattctaggatttcacaggtaggcgtgtgttttggactgcaggctgaacgtggttggcagggtggcatgaggagggcacatattttaagcgttcttagggcagatccacgatcctttacctgccatttctaagtccaaaaagccctgaaaaccaaagacatctttacaggtttgtaggaaattgatttgagagcaaaacctgatgtgaacagatttgagagtattctaggcatcttgtataacacttcattcaatgctttgtgcctcttgctgcacagatattaacattcacttatgggccctgccccatcccctactggggatgctatgcaataatcagaataatcaaactaataataataataataattggaataatcactgagtcattgtattagtccgttttcacgctgctggtaaagacatacccaagactgggtcatttataaagaaaaagaggtttaatgtactcagttccacatggccggggaggcctcacaatcatggtagaaggcaaaaggcacatcttacatggcggcagacaagagagaaatgaaagccaagggaaaggggaaaccctgtataaaatcatcagatctcttgagacttattcactatcacaagaatggggaaaactgtccccatgattcaattatctcccactgggtccctcccacaacatgtgggaattataggagctacaatttaagatgacgttgggtgggaacacagccaaaccatatcagttatctttctaaagtgagacaaaaagtcagaattctgtaacacattttttcccaagcgtttccaaaaaaggttggctttaatggagtattagtttgctaggcctgccatggcaaagcactatgaactaggtggctaacaacagaaatttattttctatcagtgttggagtccagaagtctgaaattaagagtcagcaggattctgctgtctctgagccctatgggaatatcctttctggctcttctagtttgtgatgtttgccagcagcgttctctgttccttggcctgtaaatgacaatcttctcgttgtatcttcacatcgtctttcctctgtgcctgtgcctgtttgtttctgtgtctacctttcccctgttcataagaacaccagtcatattggatcagggctcaacctaatgacctcatttctttccttttctttctttctttctttctttctttctttctttctttctttctttctttctttcttttcttttcttttcttttccttctttttttctttctttctctctctctttctttcttctttttctctctctttctttctttccttccttccccccttcctgcctccctccctcccttccttccttctttcttttaaaaatatttttcttttttttcccttccttcctccctcccttccccccttctccttccccttcctccctttcccccttcctccctccttctctccctccctccctccttccctccctcagggtcttgttctgtcatctaggctggagtacagtggcatgatcatggctcactgcagcctcagcctccctggcctaagcaatcctctcacctcagcctcttgagtagctgggaccatgggtgtttgccaccatgcctggctaagtttaaaaaaaaaaatcgtagagatagggtctcactatgttgcccaggctggctttgaactcctgagctcaagggatcctcctatctcagcctcccaaaggggcgagattacaggcatgagccactgtgcctggtgacctcatttgaacttgattacctctgtgaaaaccctgtttccagagaaggtcacattctgaaatactgggggaacatagttccccatcttataagatagagaatggatcaagacgagcagctccattctttgtttgtgtttaggccagtgccaagttcaagatcttgcctcagggctttcctggtacccctgggaatgtgtatcagcagcagctgtgtcactgaatgggtgtcacctggggggctgcctgttcagacattagaagctgccacatcccctgttaactccatgtgagggaggaatcccttccctccgacaatttcgcctgtgagaatcaagtcagattttgcagtgagaactgagctgagtgtagaataagttcccgaggtacttctggcaccgttgttactcccccaccgagaagcccagaatgttcccaggtgtgttcaaagattgtacgggaagggcttaggacggtgcttggctcatataaacactcagtggcaaagaggttgatgcttaagtacacaggaagtgtttaccagtacacataattgtataccagtgagctccaccattcaatttactgtctgtccggtacattgaccctgtgaggcccactctcggtgtggcactgctaacaggttttattgttgcttactcacttgaaaagtgtctcccttggctagacctttgtcctgagcactggacacacataggtgctcagcagcgtccctctctgcaatgcaaaagggataccgtgtgcctctgcatgtcagctctagtcctggcatcccaggagcatacggtgacagtggaagtgaagtgcaagccgagtcctgggaaccaatgtctgccagaattaattaaaagtaagcatctttttttccctggttagttaatccaggatgaattccctgagtagttcctgccgttagaacttgctctcttttttagttagacacagctcggtgttgcctccactttgacatcacgttcatagttcctgtgcttggccagaactgttttcagttgcaaggacatgggtgagactggtcaaggaattgactttcagggttccaagggaataattagttcagaagtctgtccccatacttgttttccagtacaatctgtgtctctgtgggtgttttcttttaaggctgtgtgctttataaactggagatagaaggagccagtttattataaaaaggataaaatataattaaacaattaaaagtatgtctttatagccgggtgtggtggctcacatctgtagtcccagctacttgggaggctgaggcaggagaatcgcttgaacctgggaggcggaggctgcagtgaactgagattgtgccactgcactccagcctgggcgagagagtgagactccatctcaaaaataaataaaaattaaaataaaaataaacataggtctttggccaagtgtagtggctcccgcctgtaatcccagcagtttgggaggcagaggcaggaagatcgcctgaagctaggagtttgagaccaacctgggcaacatagtaacctcgtctctacaaaaaatttttaaaaattagccaggcatggtggtgtgtgtctgtagtcccagctactcaggaggctgaggtgggaggatcgcttgagcccaggaggtcgaggctgcagtaagccatgatcttgccactgcactccagcctgggtgacagagcgagaccctgtctcaaaaaaaaaagaaaaaaaaatttatgaagtactggttgggttaacgtttcttcttctaaccatgagggaagtaggtgggctgttctggtgactcagtgtcctcccagactcactcatgagaggaagtattcacggactgtggtgatcttgtcttggaatttttttctttgcctcctggcctcacagccgttccttttcttttacacatccatgaaagggagactctaagatcttccttgccaaggttgttgtagggatgagcgatgatgtctctgaggcaccaggcacggtgctggcacccagaagctgcttaatgatcctggaagttatgaccattgctcatagtttttcctacgtttcagatcatccttaaataattgtcattggctgggcgctgcggctcacgcctgtaatcccagcactttgggaggccaaggtggttggatcacctgaggtagggagttcaagactagcccgaccaacatggagaaaccccatctctactaaaaatacaatattagcccggcatggtggcgcatgactgtaatcccagctactcgggaggctgaggcaggagaatagcttgaacctgggaggcagaggctgcggtgagccaagatcatgccattgcactccaacctggacaccaatagcgaaactccatctcaaataataataataataataataataacaacaataattgtcatttatcagcttcttcgagctcttaatatatatatcgccacctttcacaaaggcaaaatctgcattagaaacactgttgtctgattttggttcctctggaggaggggtagacagtctttttgtgggcagggtctgtgtctgtttacctctattccccgccccccactttggtgcccaccacagtcccttgtgtatggtggatgctccttgactatctgaggaataaaatcaattgtgaaacagtttccaaaaagggaacagtttttgtttccccgtttccttatagccttgtgagttgctatctctcttggctctattattaataacataaaagaaagagctgttttcttaacctctggtagttgcacatatatggggaaaaggcataagaaaatatgctggcaataaagacaagtcacagattgtcattttctttggtgactgaagggatatttcagtaatttataggtgaaatcttcctttttgtgacttccactgaacaacatttttactaccaaaagataagggaacaaaattttttaacaaactatttaagcttaaatatttaaacatttttattagtcaccacatattaataaaatatttttattagcacatattttattagtcaacacatgtgtacacagctctgatgatctctatgtagatgcctatataaatagctatatagatatcatcagagctgtgtatatatgtgttagagatagatgcacatacagttgccccctgtctcccaggggtctctgtgacccaaggttgggaccctcaagtgactagttatggatggcaaggggggctgcaaggccagagttggtcctggctagagatttcaagactcgagtggctgggaaggttttagaatgcaggtaaaccactagttgctccaaacaacaaaaccatcataatggaagcatccaaaagtgtgttcttcggcagcttcagagactatgcctaagcaataaagttttaatgtcttttttagctgcttaggtgaagaatgcatttgactgtaatctaacccattaatctcttatttttgctggaaaattgtacatatttaagagtagtggctcattgccagtattggtgatgagtgatatattttaaactatgcttcatacctttcagtaaatcttgggctgaaagatatgtacgttttgttttcaaaatttttcagtagtcatctatttaggtcaattttctgggcaaacaaaatatttgaagccctttagggtttgttattgagatgtaggctggccatgaaattacagggttcagtacctcattgaagtgtatatgtaactgttattagttttttgataacttttttatactcataaaagtagtacttgcttacagtagaaacttaataaaaaccataaatggaaaaataaaccattcgtaaacatcatatagagagaatgactattaacattttagcctaacatgattttaggggtttataatattctagtatatgattgtaccataatttatttaattgcttcccaattattggactggaagtttgcttctaattttttcttattatatatgatgctgtaatgagtaccttttaccagtaaatatttacctgcctctctgattacttctttgggattaatccttagaaataaatttgatgaatcaaagggcatcaaccctttgaatgcttctgatacttctgccatgttgtttcccagaaaagatataataattattccttccagtagtagagtattaaatgtctgcctctctttagaaagtattaccttttttcaatctttgacaatttgttagataaaaacttcagtttcaatattattgcatgtattcatggatatttttcttctcacacattctagattttttctatattgtttataaatgttttataagtgttattactttattgaggatagaaattattatgtaacacttgatggtaacagtaaaagtggaaaagaatgaggaaaccttcaacaaaacaagttgtcattaacaaaacgggttttgcaatgcaactttctgtgggttagctaaatctttagtgtgtcaggtagtcgaaagaaatttgctgtatagtgctgtgaaatatgctgcatccatgagccctctgctctttgcccatagggagcaaagacacaatctttttgcaagctgtcccagtgccatattgaccatcttccttttacagcaaaaagttattgcttcctttggttaaggttgggacacccctctggaggcacacttgaaaaatgaagacctttctcgttgttcttctgttatccaagtatcttggaagaacacctctatagcaggtagacaaggcagggtgtcattgcaatctggctgcagactgaatgtaatcccccttgacattttgccccttggaggcaactcctgccctcccctctccccttacgaccctgcccccttaaaatatgtggagctcagcaaagactatttattctgataaaaatgagcaaataataggtgtgaaagaacatggaacacttcagtgaatcaaatggagaggattaagcattaccccaataatgattggtcaggacgactgtccctgtggagtgtgtcccagaagggttgagcaatggagcaaacccagaaaatctcattctcaactctccctgacagatgacctcgtctgcgctgtcttttgcttcatggtgatgaaggtggaacaagacccttgaataagatttccatctctgaattctttaaacccatttgagatcagtgcaggcctgcagtctctctattagaactggagcagaggcccagaagagagaactgaattttcagcactggattctatgttgagaatgaaagagacaataattgaaaagcttttctcttggaaattttgcaaaatccgagtggatttttgaccaggatttcttggtgacctctcctgagagagcaggtgcctgaggatttcctgctgagtatcttggcatctgtcagactccttatgacttcattttagttcagggagtctgtttcctagccattgatttcatgcacaattcctggcatgtctcatatctctaaggtgatgtcacccttgtatttttttttcagatgtaatcttttatgtgacagtgaggtgtcttacttgtgagtgaacagctagaacctcccaagtggtttttcttttggattttgtttactcagtgaaaaatactgaggaacctgagatccttcagggtgcattttggtgtctgcccaaccttgacgtggatttggaggccaggctcaatgctcgaacttcttgttggagtggcactaaatcattaggatccctgaggacagacagttcaggccatcattatttggtaggcccttgcacacttacacacaaatgcatcattatgaacatggagcagaagattctagggccccgtgtgtaatggcacaatttgtcaagaggcctgagacctggagttggcatggattccctctcctcctgacccacctacctgctacattcagttggccaccctgttcttttgagtccacctttggatgagtagtcagtcctttctgatttttgccacctctgcattcagagctttcttattctttggcgcggaggccttccgttgggtcccactgcctgctgtcttatctccttctaatgaatatgatcatgatttttctgtatttagacaactccacgatgaggaggatgatggcggcagctaacatttatgtatgtatgtatgtatttagagacagattctctgtcacccaggtgcagtggtgcaatcttggctcactgcaacctccccctcctggattcaagtgattctcatgcctcagctccccgagtagctgggactacagatgcacaccaccacacccagctaatttttgtatttttagtagagacgagattttaccatgttgtccaggctggtccggaattcctgacctcaagtgatctgcccaccccggccttccaaagtgctgagattacaggcgcctgcctccacacccagccagcagctaacatttattaagtgctcactatactcctgccaagcactattataatttgtcttctaacaggctttttataagggaagtgctactattatacccattacatagatggtaaaactgaggcacagagaggctatgtaagtttcccaaagtcatgtactaattgatgaagacccagggtttgagctctgcaggaatggccgactccttgtggtttgagcctgggctccctctccatctgtcttttctccctgagccctcctgactgcagccatgccagactttttaatgttctgaaccccagctccagcctatcactggagctctgcctgtgatctttccacctcatgcctcccggttctatgtgtgccttcagactccatctggcagtggtatctggatggaccagtgcatagaaatcacatgagacactcaataaatgtagactcctagtgattctgactagcaggtctggggtggggccaggtacccagatttgcacgggaagtcagggaccactgctgctgactgcttttttcctgggtgcttggcacactctgtcacaatcatgttttcatttctctatgttccatttcaactggatagggacagtgtcttttgtttctggaacctgtctcttttcttggcatatagtaggcactcaggaaatagaaggttgcttgaatcctagtaccagtttactatctccttggaaagactgaaaggtagaatgtgatgtctaagcagcttcactaagcagagaaaacaaaaagtttgcaaaatagaatttgccttttaatctacatgttcttgcgtagcattgagcttcctagagagtcatattcatgctagccctgagttgtatcagcagcagccactagaacggtaacttgatgccaagagtgaattctgatgagcttcattgtgagtaagagtcccagtttgatcatctctacccagatcccgtgggacctccacactgtatgaataatgaggaggcgtggaatacgtagcatgctgcagttggccagcacccagtgtgtactgtgaggtaatcagtgtcaaatcagtcattgtagcaggagttgggagtcaaaaggagcaacagagaacctcacacgtctcctaagagaggaagcaaagaacagttaccttggctgtcatttatggggcatttgtattgtatgtttggaatggtgctgggtactagtattaatacatgattttctctggtctttgcaaaaactgcctgagttaggaattgtcattcccatttcattcatgagcaggctgaagttaagagtggttaagtaccagctgaaagggaggaggagcctgagagcaatctgggcacccgttctccccctcttcttatttatgaatgaatgaatgagacagggtctcactctgtccgggtctcactctgtcgcccatcctggagtgcagtggcacaatctcggttcgctgcagcctccacctcccaggctcaagcagtcctcccacctcaacctctgtggtggctgtgactacaggtgcatgccaccacacgcagctacattttttttgtatttttttgtagagatggggtttcgccatgttgcccaggctggtcttgaacccccgggctcaagcgatctgcctgcctcagcctcccaaatggttgggactacaggcgtgagccactgcgcctaaccctctcctcccctcgagcttacatcctactgtcctgtagccagctccaagatgttggcctttggttctctcttcaggctgaactctctttcagggagtttcctaatcgatcttccatagagttgatcataccttagtacctacctggatgagcactcaagatgttacatattcccacctgacttctttattactgctggaagatatggtgtcccacacctaagtatcccacccacagtccccagctgcatgtgtcgattattgtgagctattcaagggatacagactgaggtaaatgaaccaccagtggaagaatgtggatgttctattacaggaaatgcttagctctttattgcagttatataatagccggcaatcatgatagctgaggggcataaaaatgagagcaacagagtttatggtattctttataactgtggattctgtatgtgcgtgtgtgtgcacgtgtgttctgcatgcatctccacggcacattatctggaggtaacatgatcatcaggccttgagctcttttataagcaatagattgtggctggaaattgaaaatttagtttctgtagctagaaaatactcttttcaaatgccatctagaacagtagttctctgagtgtggttcctggatcaggagccttggtatcactgggaatgtgttaggaatgcagattcttgggttctaccccggattgaattcagatttgggagcggggcccagttatctgtgttttaatcaccccctcccccaggtgaatctgatatgctaaagcctgagcctcactcccctggaaagtgacgcctgattcatctgccagcccatgggcacccattaggaaggtgcttatgggagctttgacctgggctaggtgccggctcttgatccatctttttctaaggctgagggtgtccatagaaggagaagtaggtgcatccgcttagatgttatttaaccaaataaaggtttacagcttacagaaaagaggcaagattaactaataccttccaaaccataatgtaaaaaaaaaataaaaaatatttactcataatggagtataactgaacaaatcatgttgctaatttttttaggatatgttttgtagcttccattcagatacatcttatgggtaataaatacacacgtgaacacacatatgtgtactaacaatatttttcagacttttgattttttagatattgagtatagccttgttactaccaaacttttatcatacttccttgtgaaaggatttcatggcatatttattatttgaaatatcaaatagaaatcagtacagtctcagcattttaagatacttgatgtaatctttggaaatatcttagacattgcaaaataagggttaatagtcatagtatagccactaacgggcagttctgaaattacataaagttaatctgatgaactgatagcaatcagtttttggctatacataactagataagtgagaatttagagattgaatacatgagagccctttttatgattttcaggatctcaagtatgaagcaaaataaattcttctataccctaaattcttgcaaagtgatattttgattagatttgagctaccccagggctagcaatacttgaaagtgtgactagacttaacctcttagtagatagtccgcagtaatcctttgaaatatacatcttgctaaaagttcctttcccaaggaaataatgattaaagataatgtgatgtgtacaaggaattctgggacttgtagtcgagaaacctgaactttaatctagactactcaaatttataactttaggcaaatctctcttgactttctaggctttagttttctagggttttgttttgatttgtttttttatgtttttgtttttgtcttttttttggggggagggtgttgagacagagtcttgctctgtagcccaggctggagtgcagtagtgtgatcttggctcaccgcaacctctgtctctcaggttcaagcgattcttctgcctcagcctcctgagtagctgggattacaggcacctgccaccatgcccagctgatttttgtatttttagtagagacagggtttcaccaggttggccaggctggtcttgaactcctgacctcaggtgatccacctgcctctgcctctgaaagtgctgggattacaggtgtgagccacctcgcccagccttgatttggtttttaatctgtaaaatggtaggtgttgggtcacatgaacaatggctcttttacctccactaattacctagacgctagaaataagaatatggataagacctaaaccaaattttctagctaaattttgtaaagtctgaacaaaatctgtgtgcgttttaatctttcttgtaatcttttcagactctgtctttaaaattatatatatttttagcttctaagtaaacattattggcactggttttgataggaactttactccaagtgtattgacttagtagatatgttaaaaaggttattgcttagtttgtggaaataatacaagctgagactttaactgatatttgtattttcatttaggttccactgttttctcttttgaatgaaaagtataatcctattaaatctaaaatattttcttacagtgatccgtatgtgaaactttcattgtacgtagcggatgagaatagagaacttgctttggtccagacaaaaacaattaaaaaggtaggtgtcgatctttaaccaaatgtcatttaagtcataatttaatccaattatgcacagtcatgtgctgcttaacacctttttggtcaaggatggactacttacacagtgatagtcccgtgagattataatggagctgccatatacaagtgcatcactttttctcttttttttttttttttttttttttgagatggagtctcactctgtcgcccaggctggagtgcaatggcatgttctcagctcactgcaccctccgcctcctgggttcaagtgattctcctgcctcagcctcctgaatagcagggattacaggcacctgtcaccatgcctggctatttttttttttttttttttttttgtatttttagtagagacagggtttcaccatgttggccagactggccttgaactcctgacctcaggtgatccacctgtcgtggactcccaaagtgctgggattacaggtgtgagccaccgtgcccagcccactttttgtcttatatactgtattttcattttaagtgtctttcagtattaaatctagaagttttccaagacttttcagtactaacccaagatagtgattcaggtttttacttaaatgcctacaaaaacagtatcctgaaaatgtcataagttgtaacattttttcttgcacagaatacagcaaaaacaaggatttgtttttgtctttgtatgtttcacaaagaaacttaaagtaatttaaaatacatttaatgaaatggagctgtttgtggaattggtaggcacaccaggaatagtttaacttgaaacaactatttctaaaggaagcaaaatacttggttagctacatggaaatagagaaaatatattaataataaagctatacatgtatgtatatatcttattttcctaatttttatgtacatgatttcattaaaaatttgtttccataagtatgtcttttagttatttatttatttagtttgagatggagtgtcactctgtccacccaagctggagtgcagtggcataatctcagctcaccgcaacctttgcctcctgggttcaagtgattctcctgcctcagcttcctgagtagctgagattacaagtgtgcaccactatgcccagctaattattgtatttttagtagacgtgggattttgccatgttgaccaggctggtctggaactgctgacctcaggtgatccacccgccttagcctcccaaagtgctgggaatacagatgtgagccactgtgcctagccaataagtatgtcttaatttgcctatctccatgtatttatagacatatgtaatatatatatatgtaaatattttttaccctatgtttggaggctttattgaagatgcatgttctctattaaaaatacttggctgcatgtggtggctcatggctgtaattctagcactttggaggccgaggctggcagatcaattgagcccgggagattgaggttgcagtgagccataatgatgccactgcactccagcctgggtgacagaatgagaacctgtctcaaaaaaaacccaaaaaacaaaacaaacccctttcatctgtgctttagtatcatttatgggttactatgatttttttccttacctcctttagaggcgggtgcttagatagtctaacactttgctgaacattttctggacagcatgagtgctttaaaaaattgtaactgtcttgctgccatgcaggcacccaggatgcagccaggtccttttgtgtaaggaaccgtaactgcagcgtgtcctccacttggcattgggactggcattaaaaatctgttttgcaaacaggagccagtcttttgattagcagggaggatgcctgcgagggacggaggccattgttccctgtgttaggcgttgttgctggttcagtttctaggcgagtgggggctgtctagaaggctcaccaggaaggcagctgggaaacttggttgcctgctggatgtggagccaggaccaaagccggcgactggggctattgcaatggatttccttccaaagggaggtcctccttctccctccctttccacggtcgagggagtagctctgtagctgggtttgccctccttctcctgctgcccgcctcctggttcgtatgcctctgctgcgttcgggtgcgagaactgccgtcatcctcctctccttgccgtgttgtgactggttcttcgttcgttttgtgctctcctgtcttgttgctttcctcgcctgtcatttcccatgtgcatttccgtgaagctgccctccgggactgcagccagaggcaggccaggcctgctgctccactcccctcccctcgttcattaccatccttggcttcattcacatgggagaaaagtatgaaccccattatttaggattgaattcactgtggagttgtgggtggggaaagtgctgaatttttgaaaacgccggttcagtgttgtgtgagctctgtgtttcctatttttatgttgcactctgttgatttttttcatctccctgaactgatctattaaaggaaatagattgataaatatcattttgactaaaaatatctatcgctgttggtgaagtgatggtttttttttacatacaatttttaagagctgtctttaagaggcttatgcatgtgcagatgcatgaacacacatgtacagtcttccttcctagaacatgcttcctcttagttttgggggatatctggcagtcctttcttccatgctgaggacaaaggtatccttgccatctccttgtgagatgtacatttaagtagactgatagaaagatgaacagatggatgaatggagaggaagactgaaggataagtagacaagtattttttaacctggttatttttggagaaaaaaataattcacttttggcttacatttggtctttttttttcttgttataaaatctgatcctcagtatagctctctataaaatgttaagatttcaatatttatataaacaatgaacacattcaactttcccccacctgcttcgttactctgcaaaacagatttgtagcagggagagggaagtcaacaaagttcatttccttcttggtagaataatcatatcaatgctaatttcttgaagaaattttttatattttcacgatgactctttccaggcctttgatgtttttccttctggtgatagaagcagtttaaggtttcatacctatgaagcatctgtttcataaatacattccctcccnctccagtttggtttgtacgctagtctcaaataatcgactaaatgcttctcttagctttttttaatcaaaaaaatgtttaagcaaatatgtagactgtattgtactagtaactgctaatgtttgaaagactaaaagatactacaagataatttctcttccagacactgaacccaaaatggaatgaagaattttatttcagggtaagtttttcattgtttggtaataattgttattgatacgtctaggtcgattatcacagtcaattcatcttgaggaaaagctcttaaatttttaatgagaaattccttttaggatgaaaaataggtagcctcctaatgtgtcccaaattttgaaagactagaagtagtggtcacagaatccggacttgtttcattggggagtgttttggagaagtcaaaagaaaattatccaaacaccatgtttcatcttttgaattcaaacctttctttaagaaataagataaaatatcatttatgagaatggtttaattctatgagacgggttatgaaatattttagagagagtaaaacagtagaggcaacatgattaaaaagaaacataaaaattaccagttatattctagttagggaggaaaattttggtaactgaaacacttgagtgcatatatatgtgtataatataaaattacttctggaatctaaatacaacagaattaggtaagatttcctcaaccttttatatttaatatttagaatagctatatgtcgaaatgactgaaatatgtgaattagcagagatttctgcttattgagcatttgtggttgttgctgtgttttactactgacattttggaactattagactgcttagctatttaattgaaagaaaggactttctcttcaaaacgaaggtatcttaattgtatagctgtgatattaaaaactgcttacctccagaaataatccaggtcttctgattagtgcagatttccaaaggccagtattgccatgaggcccattataattggtcctgatttcttcctctcaatcgcaatagtattttttgtgctccaaacttgggctactacatacagcatctgctttccattatgctcagagctgaaatatggcactgatactttcatacttggtgaaatcctatgtacagcctccaccagatgtatttgaaattaccctgtggaggactgaaaagctaataggagctgatagatgctgttggcctttagttaactctgaaatatagctttccacttgtgaacctccaaagtgtttagactcctttcagtggaacactggcacagttacataaatgttagtacatcccatacttttttcagctaatcttggcagtaggcacatttaagttctatttttgttagtttttctgaaggttttttttgtttgtttgttttgttttgttttgttttttgagatggagtctcactctgtcaccaggctggagtgcagtggcacaatcttagctcactgcaacctctgcctcccaggttcaagtgattctcctgcctcaacctcctgagtagctgggactataggcccgtaccaccacgcctggctaatttttgtatttttagtagagatgaggtttcaccatgttggccaggctggtctcactctcctgacctcgtgatctgcccgccttggcctcccaaagttctgggattacaggttcttaaggtctttatatttattcattttacaaatctttattgagtgcctattatgtgccagctcctgcctgtagcctgtggttgcattggtaagcagtgtgacccttcatagagcttctaaacagatagcaaaccccatctgcttgttctgtcgctaggctgcaggcagaccacggaccagaagcacaagctgagctctctgtgcttgtatggtcaagtgttatttcatgcattccccaccatgaagcagccagggcctaggtcacctctctgctttaccatttagagcctttgtgaccctggaaaggccacctgaggactctcaatctccctgggatccttatctctcacataggagagagaatccttacctgcaagggttgtttcaaggatttgcatgcgatgatgtaaatgagaacatgtagctctatgtcacacatgtggttggtgcttagtaaatgatacctgagtttggaagatgatatgggccattttggtgaggttttggtaaggaaaaggaagcaaaaagatatggaaagcccagtagctctgtcattgcctcacagttccaggtctctctcatggttcacagtctaggctctggagacaggcagcatagacctagtgcaggtcctggttgccctacacattagctgtgggctcttgggcaagttacttcactgaacctcagggtctcggctcctcatttataaaattgcgtgatagttatacatcataggattgctgtgaagattaaaggagatcatgggttgttgatatttaataacaagacagtgcctaaaaagtaagtgcacaggctgggcacagtggctcatgcctgtaatcccagcactttgagaggccaaggcatgcagatagcttgagcccaggagttcaaaaccagcctggggaacatggtgaaacctcatctctacaaaaaaatacaaaaattagccaggcatggtagtccaagctactcaggagagtgaggcaggaggatcaattgagcctgggaggttgaggctgcagtgagccatgatcatgccactgcagtccagcctgggcaacagaacaagaccgtctgtctctgtctgtctgtctgtgtgtttgtgtgtatgtgtgtgtgtgtgtctctctctacacacacacacacacagatacattcttaagctattacaatcttcttcattatttttatcattactattactgctatcaggactaagaaatatcctcaggcatagacattttttgatctacagtcatgagaatgccttgtacagaggttaggaacccgtcaaagctatttacaactatcctttcttattttagaaaaacagctaagagccttctcttcttttgctatgcctaaatttggggcagaataatatagaaatcagtaataggaaatttgatttagtacacatagaattcccagaacagcaggataattgttcatattatacaattgagttgggcgcattgtaaagcagtatgttattctttctgttccttacgtcgctgttcaaatgattcctgctcgtttaaaaaatactatttatgttccttataggtaaacccatctaatcacagactcctatttgaagtatttgacgaaaatagactggtaagtggatgcctgtatttgaattttgcttcatttttttattaactggattttcagagcagcgtctttaaaactctgtgtttatgttgtacttaggacagtatatgtgcccaaaaagaagactgtttttgtcccactacgagtttgatgttcaaaatcctaacaaatagttttatgttgctaggataaaaaatgtatttgtatgtgtgtgtatttttattgcagttaatgttaacgaaagccactggtgatagtaccagcccatatgctcatgctctaatgttgggaatacagaacggtaggcagatctctaaagaggccatcaggaatgtaaacaaactttgctcggtttttaaatgaaagccagaccatagtactgggatgcattcagtagcaaatctatggtaattctctcagggaaaataacaatctaattaacaacgtatagcaaaaagtgaatctacatttagcaggtaaagtcaagccgtattttaaaagtggttgccttcttaagagagaaccttagaaagtacctttaaagaaacaaagatatgcctgaggcatataacagatacaaactaacattttatatatagattgatgtatatataatatgtttatgaagatcgacacatacataactgaaataattatgatttcattttattgtttttaattttttttagagagagggtctccctctgtcacccaggttggagtgcagtggtgcagtcgtagctcactgtaacctcaaacccttgggctcaagcaggactccaggatagctaggactacaggcatgagccaccatgcctggccagatttcattttagaaatggaatttttgaagcacattttgctttcttaactatctaaaacgtgtacatcaagtagctgtgaaccaggtgttccaactatgaaaatgaacactatcatgttaagtccttaaggtaccttcagaagtgacactataattcagtgcagtcattctcaaatttaccctctctgaaacttgtatggtatgttgactggttaaaaggtgttcttaagaatcctttctgcagtattcaattgaaactccagatttttaatagctggacgttaatagaatatttgaattggaggagccttatacaataactcatttaactcctgttgttgtcgatgagaagaaccaggtctagagcctttacataaacacatcagtcagtggaggtgccagggtctgacctgctggcctcctaagtcccagcccagtgatagtttgggaatgtattgaatctcatatgattagtattattctccaaaagagaaaactaacagattttggcctaccatcctagtatcttttccattaaagtatgggatgttgggtgatgaacagtcgtacagtgtaactaaaccacttttgttgtatgcatcaaagtactttcttgtgaaattggatgagagattctgctgagggtgcagttcttgtctctccatctctcatccagtgaggaccaagtgagttaagcagtattgagtagtataacagtacgttcctggagacatgggtgtgtctgtagactaatccttattctccaattattgagtataatatctcttgtttaacatgaggaaagggtcaaatttgaggaaaaatggcctcttgtttgatgtgttttagttcattattctcttctattaagagaaattcactgttaaaaaattgtttcccatttccgtatctgaaataatgactgtagttgaggtgatcttgccctgggtctgaaatcatacttccaaaccaaaaaggactttgaatacaaaacttttaagaaatcttgtatgaatacaagctatatctgaaaaattgtgttttataatattgatgcctagttttgccccaggccatctgcagtgtggttactatgcaaagaatgctggtgttgctgtttttttttttttctttgttggctattaacccagcggagacaatatgtggctatggtagtacttggaagttctagcattacacagactagcttccatttctctcatagaggtcatttttggcatttaaaacacatacttttagaaaacagatttggatgtatgtaaacacagggttaatccaccacactctggatgctagagctgttgacaaagtcatgctttgcagattttaaaataaactttttgttactcttacagcttggtattttcccctcctattttttttacctcctctaaataaacctctttgttaaataattgatgtttctggatcatagaaaatagtaagtttaaaatacagaatatttccaagctaactacaaatctgatgacagttttttgagtgtgcacttttccttttatttcttaggtcctttttggtcctttgcaaacatagtaagattccatatttgtgtcccaactgtggtaatattgctgacttcttactggaaaacagtcagctctaggtagcatttcttctgtgtggtatttaagttaaattattaccaaaaaaaaaaaaaaaagcccacatgcactcccttcttcaattttccttttgttttttgttgtttgtttgttttttggttgatgttttctttcctacctgacatatggaagacaatgttttctccagctgggttcattttctctttgaaaaggagacactttggtgtctgccagtcatatgtgagctacacacacgtatacaccttttaaatgaaaaatgctgtgatagcaggagggctctgcttggctaactggttgtgtagcaagtcgggccccctcccctccacttagctattttgttacttgtagatcctgctctaattatttagcattaaacggacactaactctgtagggtgtgtaatcgtatttatagtactgttttattagtttgcattccatcctggtagtgtagtgatgtcataaataacagaaacatggtatccgatgcttgggaaggggtttacccggtggccaagccatattttacttgtcattattccgtgtggcggaaggtgggaaaataccgtgtgtgctgttaaacatgccaggtccctgcactggttagacagagtctcagtgctgtgctccgttgggaaagaagtgccctgcgaatgtgatgtggtttagatttatagcagcgtggcttgcagtgtgtttgctgccttagtcagctgtgagagcgccctgctggggccactcctttctgatggaaaagcagcagctgggaaggtgctgtttcaggctcttgctgtttaaaaaaaaaaaaaaagagcgagtaggggaaaactcctctaagtccagaagctggcattggagggggagagcgcggtcatgtggttctggccaccctaccctctgtcacagtgtggatgagagctttttgctcttatccaatcatgcctggaatgccgcttgccacttgggttatttctgctatctgtcgctcccggtgccgcagtgctaacagtttggcagatgggacactttttcttggaatttgtgtctttggtttgtgacttctggcagtgtcgggcctgttgttgccgcttgccctagccctcctggcccccctggtcaccatggcccatcggcttcggtttcattttggctctggtcgcagcaacacagcccccgaatcagacatcctagaccaggagagagaagacgacttcttcatggcattccacaccctaccgcggagaagcagcccgcaccccttcgcccagaacggaggggaggacggcggcggaggcctgcagggaggcgtgggtgcgcttaagcggagctcgtccatgttcatcccgcagctcttgaccagcatcgacgcccgccccacgtgcagctcctccgtgcagatctccctgcagcgcaaggccacggacggggccacggacgggtgcgggccgcccgagggcgccgacgatgggcctccatgcgcaacgcccgaccccagggaccaggcctccgccactgccaccacgagggcctcgccccagagtggctcccgggagccctcgccgagggacacccccgggagctcccctccgagggcagcccgggacccagggctccaggtcaacggcacgtgcggccgccgcgtgcggtgctccggccccgtggactgcgcggaggaggctgccccgggcctgcgcatccagcaccgcgcctccagcgccgacgtgcgccaggtgaggctgctgcccctgggccccgatggccagggcggcccggccgcggcagagcccaggcgctggtccctgcagcacgttccagatgcttctggaagctctgggaagcggtgttttgtcttccagttgcagcagccccaacaaggcgcttcggggccaggcagcgacctcaactttggcttcacgggcacaaagggggacaggttggtgaggtatcctcgcattcggctggagaggagcacctcgtaccccacgcagccccgaagcgagcgagggagccccacggaagatcggggagccctggaggcatcgcctcgagctggcaggatggctcctgaaatccgcaggacgaactccgcggagaggactccgcagggccaggggtgcacatttaagatcaggcaggatcagaacgcggggcagcagcattttagaattcttgtaacccgggggccggaagaagctccccagaatcccgaggagaaaagcgccaaaagccctgtttccacgggagctgacaccacggtaagttcacagcgtgtttacatgtgtttactgatttcaacttcgatgcttactctgcggcgtaaccaaaataaaacctcaccctctgttccgggagtttccctgcttcaggccagtggatctgaatgtttggccgagttctggcacgatgatttgtggtccagtgtttggtgcgcaaaacaccatttctgcaaatgtcttctgtaggtcctcaaagtcaaagaactttgtctgtttgggaaatccaagcagaataccttccccctgcttttatttttctgaatagaagaatttcgaataaaatttgttactttaatctgccaaaaaacaagtcagtgccccaacgtgctgatgttggaattgcatttaaaaagctgcttgcaagtatagcctgtgacaatactttaaaaataatcagttctcggaaaggggaggatattgcaaaggacctcagtttcgtctcttaatagttaaaataggtgaacgtaaagtttagtggaatttgattatctgtcatggcctgtttgctgcaggaggtcaggtcagtcgttgttatataatttgctttgttttttgtcccattaagtaatactgaacgagagtagtgtcgcttgtgggatagtgacattactatcccacaagtgacactgctaagatactaacagatgcgtttttaaagcacattgggttatggcccaaggctaggggaaactgatggggactcgttaatggtcagatggcgtggcgtgcaatttaacactgcacacttgagtgtccaagccgaggatgctgtatatagaatagtaagtaccctgtctccagctgtggagaaatagacgccttagaacagattctggccttcctgtttctctgttcctgatcgctccctttcagtgaaatggagtacagagagacagctgcacgctccatcgaccaggcatatgatgactctgcagctttcgtggtttagagtggaatgaaaagtttaatcagtttggtttcttttactagtaatcactagccagtgagtgctttctcctaaagaacaagctccttatattttgaattggatattttttctcctgaatttcatgtgactgccagtttgaggatatgattagtaaatgtctaggggacttttctttggatttcacttatgaattgtgattttgaaaagtgagcgtctgagtattactctagaattgtattgtcttttattgctttgtgttcagaaataagtttcgtctttcaagtaaactttatcactcctccatcattggttttcatcattttgaagatacaatcagatgcttaatgaaaatttatttttcttcttctctttccttccatgtatctcctttctttcattatctcaaactcttctattgggaaatggctaagtgctttgtcttggtctgaacctataccatgtattacacaatggtacaaattttgacagtgttttgatattatagtagcctttaacgcccacccccaacaaattaccatcatgacagttgtaggctttgttcggcaacacaattccatgctgaacttggaccacttaccgcatgaagattgacaaaaatatatttcctaaagtttgataactattcaattatattaccaaaaactgaaatcactttgcagttctgatgtggaagacaaagggattcatacaattaaactcaaaaaagttcaaactcatttggtttgaactttcaaatgtaattagaaaacaaatcgaataaactaaaacttatgtgtaccttgcttaaaagggctattctaacttgcaaggcctatgtagtgaaaaacaagtttctacacatttggagaatataaattctggaataaagagcttttcttggagagtaagttccaactagtgaacagtagtttgcattttcatatgtatgtatttttgtacacatacataaattagtacgtggttagtaagctggttttcttttaagcaaaacgatttttctttaaaaaacaaaaccaaaagtggtcacataacaaaaccgcctgctccattcagcaactttgtatgcatttcatatggacaggggtgttaagtttaggcagcagctgccaccgccttacttatcttgaaggaaaacattcacttgggcgtctacagtctggctgctaccaagcttttttggcgtttcaaatatccactgctttggtctaaaggacattacattattaagtttacatgaaaaattagctagaatctgttgcagtttggtggtggaatgatacggaaagtcttcctagatttgggaataccgctcgggattcatttgacaacgtgctcatatttcataagctatactttagaccttattacaagattaagttgttgagtacttttatctgtgcctcccaaacatcctgccatgactaaatctaaaatgtaacatgactccaaaaaatgttaaccaactaaattattagaaaaaatacaggggaaacccttgtgatgataagttttccacctggtttatcactgtcagtagacaagaattcattcgtatagtcatcaattataatcagttaaaaattttcagaattgttagaatttaccaattcagtctgtggcagtcattagtagtcatttagtgagtaatttagttattttcttataaattagcttttgggttattgggttctgagcctcttaactgcattagagttattctgaggaagttggaccaccatttaccagcatttgtgccccctttgtatgccattttgtgcataataactgtgaaactctgcattttacaagcttgaggagccagttttctaatctcattggtgttatgaagtactcaaggtctactgtgtatataacattacacccgttacttggaaagtttcagggactatctcagtgtcttgctgacacagtttgtaatgtaaacggagggaggagggcccacccggacaaaagcagtaattctaacacctactgcatatgctattggagaagagagcgttctttcagctcaagctctctggactttcctctgtgtcctctcagtggacatgtacttcacaggagtagtgtagtaatctcttgtgattaaaaattacttttattgaacaacaaaggaatatccaaattcttttcatttggggaaactttgagtctcttttacagaagatgtttttaatatacggccattttttgacattaatattagtcgatgtctgttttttaccctaaaaataactcgagtatccaatgtattaaccacccctttattttaaaacataacaacacaggaggcgaaggtgggaggattgcttgagcccagtagtttgagattactgtttctaccactgctctacagcctgggcagcagaacgagactttgtctcaaaaaaataaaaataaaacttaatattgtaatggagaagaaaaacaagtagcattcttttcattgacctggtttctgactggattcaatcaactttctttcttctctcatgtatagtaatgctctctcttaatgtggtcttagaataaaccaatatatatcttcaaatgtcacctgttttcagggatgttttgaaaagttggataggcagtgcacaaggttgacaccgatatgtttgtaaacagaaactgtacatggcttgcagcatagctcatgtttctgtagcacttcacaatttgaagaatgctttgtttatttcacttaatatgtatggctgtcccattgtggaggcattatctcacttgaccctcccatgtgaaatggtgttatttcactgtttcagatgaaaggatgtgataccgttgttaggtgtaataacattatgtgtatatcatagtgtatactatgataccactttgtgcacctataatgggaatgtgtatttatgtgtgtgtgtatatttgcacaattaaaaagtatatgttaagccaaaaagcagtttaatgcttcctgtgatgtgacagtttttttgaaaagtttagaggtggtaacttcatttggtgtcttgcagcactggcctgaaggtgagagaaggcttctttggggatccaaagagccgtcctctgcagttcactagcttttggtcctggagtacttagactccctctctaagcctattcctcatcagtaaatttgaggataaaaatgtccagctcgtaggttcatagttaggtttaaatgaaagtgtccatggaagtacctgattcgtgaaccaggtatctgtaatatacaagtctttcccctagcaggttaattaggttaattgtgaacaaccattttttgatcagtatggcatttaacacaaggacaacatgcatttatggcatacctggaaatgtttaataaatagctttgatgctctttctgttgtcatctcatctttcctaagtatttgtccctaacaccaaatacagtcttggaaaagaattgcttcctgaactatgcattatagaaaaggactcgtaagtatatttactgtgttgattttgaagccttataacattttggcttgcatttctagcatattttttaccatgtcattttgctgtaatatttccagtggttgagtctactgttactttggtatagactgaggcttttgagaaacaatatagtgttatatctacaaaatttccacattgtatgactttaaaatgagggagatatttgggaatatgtcttattttaagatactgtcttttagagagttttcataaatggtgcagctgcttctcttggctaagcctggtggcagaattcctagtcattgaaataaatctctaattttataatacatactgataagaaacttgctatcttttcataaaagttcacagtaccagaataaatttactttatgtaaaaactaccttaaaatgtaataaatgttggatagttgaatggtttctggatagttgatgaatatttctgtatagttgaggcgaatctaaatggtaatgctacttgtgcaactgtcaatgatctagcacattttttaataaaaataattacctgcatattactgtgggcgatacaggttagctatcctaaatacgtttttacctttttaactcttaattatattaagccatttgcaagaatgggaaaaagcaggaaattcataggtggtgttgaaattgctgattctacacaaaggtaccagaatgtctacatttcctctgtaaatgtcaaaggaaactttggaaacccacctcagagttggctggtgattattcggacaggttatcatcctgtctgcaaccttctagttctcttagttcataccaagcagcatgatattccatgtcctgcacaaaggagagcaccaaaacagccttcacctgctgcgtatgccccactctgaataaaaaattaagaaggccaaaggacggaatgtgttaaatattagcaaaagcaggtattgcagaatgtctatacatttctgggcaggtggagattattgaaagatttttagaaataatcttcgttcaccacattccagtgccaggccctggacttctgtctctatttgtgataaaatgtttttaagaaatgctggctgggcacggaggctcatgtctgtaatcccagcacttccagaggctgaggcaggtagatcccttgagcccaggacttcgagaccagcctgagcaacatggcgaagcctcatctctacaaaaaatacaaaagctagccaggcgtggtggcctctgtctgtagtcccagcttcttgagaggctgaggtgggaggatctcttgaacccgggaggcggaggttgcagtgagctgagatcgtgccactgcactccagcctgggcgacagagtgaaactctgtctcaggaaaaaaaaaaaaaaaaggaaaagaaataatcttctctcagtgagcatgttgaatgcataatgttctcactggagttctcctttggaatctcttgattattctgctgtggcttccttgggccaactaggatacagaggagaataaatgagtaactcagtgagacaggtggcctgatgtgagtgggcctgaaagttagcccctgatgtcctggctggtttcatgccatgtcctaaacgggcactttcctggtctctaggcatcaccatgttttgacaggaagcttagtttctttcaggatggaggatggaatcaattgtatttcaagaagcctgttttttatgccctgacaattttagaactgtggactgttctgacacttttgagtacagtgattaaatctctgtgaagggacaggtcatgaaatcaaataaaaggacggatcataattgagctggaagggggccctcctatctctgatttgactcgttgctacactttagtattcggaaactttgtattggttcccttaagtgcctgcacaacctccctatttctggaaaccattcagtgtttgttttaatgttaagcattatgccacgtatccagtaagcagagcagagtaaattcctccaggtagcaagagactggaatttcccccaggcagatcagcttttcacaggttcctagagtttacacagccttcttttgtgacttaatttttgtagatcacagtgagtcaagtgacttttacttccctgtataataactttgaggagcctacttgcaacccacatcatcactcattatcttgcttacttctttcttgggggttagatgggctggggttgttattaagcatgttaaatactttgaaattcaaatcgtttctgatagatttagtttctctttcttctattggtcattcgagagctggtagacttttaaaatacatttaatgactcacacatgtcataactcatccatttccttgacattttcaagcgtgataataaatcctacttcttaggcttttttttttttttttttctctctctcatgttcttttcaaatgcatggctaggtagttacctcatgaaggaaaacaactgttttggtccagattttaaaaattgagttgaatagaaaaggtggggtggaaccagcaatactgaaatgtaataatgtatattaagctccaaccaaacaatccagcacttcttcaaatccaggaggtcttctggctaggagttacattgcagaactaacatggactcttaaactttgtaaggaattagtcacagttgaacactggaaactatcagcatacctctgggcttcttttatatggtcttcctcatgagttaaaatgccttaagcatagtatctgttccataggaccttactgattatgcttttccacttgaataaaagagatattaagttgtaataaaactttaaatattttaatttagtttgaatatttaagttgaattaacctcttactacagtaattatcttttttgctaacttcttactacggtaattatctgcttttataaaatccagaaacgatgttatacacattagcacgcattattaggtgcccaaatgccaaggctaaggacacagcaatgctaaggacacagtgtgcctccggcctgcttgcaccctcggttgaaattatattagcaagagaagctcctgcattctgcagtatggcatttttctccagctaatgtatgcaggggtcatttttaaatgttagattcacagatttgcagagctgtgagttgccttggaaattatgctggccagttcctttaattttaaagatgaggaaagtgagaactttcctttttaaaaattgatacataatagttgtacctgtttatgggggtacatgtgatatcttgtacctgtttatgggggtacatgtgatatcttgttaacatgcatacagtgtgtaatgatcaaatcattacatactgaaatatttgaaatatctgtcactgcagacatttgtggcatctgtgtgttaagaacatcccaaatcttgtcttctggctgttttgaaatgtatagtaacttcttattaactgtcgtgctgaggacatggactactgtgctgttgaacactagaacttactccttcatctgaccgtattttcgtacccatttaccaaccctgagagctttacttttgcagtaatagagaatattctttttctctcttgagtatgaaataattatttttgaataatcactgcacgtgaagccctatccttcttgacgttggacatataaatacttagggagcttggtttatagagctttcagtttcacaaacagatgggacagctgaggtgaggcctgcctagcagaagaagccttactcctgatagcaggcactaagcaaggcattgggtgacagattgcttatgcacaggctgggagggacaggaactgtgtcatggaggggcaagactggaactagatgctgaaaagtgaccagatttgtctcagtgggccagtgggaggggcctcattgaaagactgaaggtagatgtgcctcccagggatgtggtggtcatattggctccaaattgccttgttcattattagcaggtttcagcaaattatttttcatgtgaaacgttgctgaagatttcttgggtgtggctgtcatcacaaacaattcctctcttttccatcaaatgtggagttggatgaattccttccttgctggcctgccttccacaaagctgctctctgaacacctgccaggccatgctgaggacaaggaaataccaaggcacagtttctgccatttaatggtggtagcagagacccaggaatgcaatggattattgtcactttcattataacatcatagtgtaggatcataactggaacagagaggatgaagctttcttttggggaattgagggagggagacagggtcttgctctgttgcccaggctggagtacggtggcgttaagatggctcactgccacctccacctcccaggctcaagtgatcctcccacctcagactcccaagtagctggaccacaggtacatgtcaacacacgcagctaattttttagtttttgtagagatgggggtcttactatgttgcccaggctggtctcaaacccctggcctcaagcagtcctcctgccttggcctcccaaagtgctgggtttacaggcatgagacactgtatccaactaagtaggctttatttatggagtttataaagaaactgtttatatatacaggggagaatttatcctgaagaaaaactaaagaaatgaatattttaaatacgtctctgcatttctttttgttggatatgacatttatgtaagaaaaatgctaatctgtatgatatgagacatgttaactacatatggtacatgtatttaaatatcatatgtatttagatttagcaacaaaaagggaaatataaaccatatttccaccatttgaacaaatcgtattcaattatatgtgcatataaccatttgaaaaaattataatgttgatcggatctgcaacctaaaccaagtgccaaattaaattcaggatagataatttcatataaaatgtttcacatcatagaaaaagcagtgaaaattgagtatcagatctgtgaaggatgatacatttctaaccttagaagcagaaaaggaaatcacagaagttggatagattcagccatataaaagtattaaatttctgaaccatgaaaaaaataactaaaatgagggaaacaccagatgtttttcttagtgattcatgtaagttctcatatgtatatcttttcagtgtctaattatgtgcatattttggccagtgggtttgtatctctgtagaaagttctagtaaatactggagaaatactgaggttcccccactccagctctttcactccattgcaaagtaggtcttgtaggtgaatcacacaaacggattaacaagaaagacagaaatgtccagctcccaggttcttcattatgctgttgtgttgtgccaatagaaaatacaatatatcaaattggagaacttgtggttgaaaataatatacgcagattgctggtggcagtattcatggatgtgactttggagtgatttttaaacacttaagtatttttaaatgataagaccaattataggtactaagagtcttgtgttttgaagtgttggagttaatccagataaagttacaaatctaagcagacaccttattaagagatcattattctctgcttttaaagtggacttgctttctatatagttatgaagaacagatagaaatgttttaagattactggctactattaaaataatctggtgactgcagttatatctgggtctaaggcattagactttttggaaaatggatgcttttaatctttccttccgtatatttgtcacccagaattttaaaatttggaaatttcattcattcagtccagatagagaattgatcaattggcaattttattatttttcgctcatgaaaaactctagggttacaagaatatgctcctgaagttaacatagttacttttaaaatgtctcaattctaatggttaggtattagtcctctgagttccggttgccccttaacttggatcttaatttacagtttacagaaaattgttcatatttcatattttaagatcatgtactctaaaaccctattatacttgaaatgaagacctgttatgttatactagaatctctcatgaaaatgtaacagttcccaaggaactttgtttctgtctccatggaccacactggctactgtactggatggagggcaaggcgggagctgagaggcctttgcagaagtgcatgtcgccttagtatgtggcagatcctggtccctggcctgtgctgtttccctccacaccctttgatttctccgaataccaggaaagatcatggattgtctcgggagttagtctcccccttagtacttagcctgtcattttcatgttgcaatgcctagaaaatgggaggtttttcttctccttaaggaagtgttatttcaagatgctttctgctgcctgtgtcatgccagggcgtgggtggatatatttttgcacttttgcaccagcgagtctgcttctgatttgcagattgcatttattataaggcgtattgtccattgatgaataatgtgtgggcattaaagcaaagctgatacatagcttttaaaatagctcatttatcctgcaagcttcacccccatagagaggcaggcccttcagaagcgttttccaggagcaaggtttctgcatgtttccctcagttttggaggtcgtcgttttttgcccctactgtgggggccaagggaaaattgctctgcgccttctgatggtcccctgaaaaatcaactgtcaaaagcccaattaataggagaaatgccatacaactttattaacgtgcatgcagattgattaccccaaccccccaatggggttcagaagcttctataccatcctgaggttataggaagaatggggctcagagcccgaccaaaaacagggtatggtggtcaatcaggttatggtggcaagaaagattcttggagggagagaagaggaggcctggctagcagaggtggccctgtcgtgtagatgaaacctcctaggtagcagccctcacagagaaggcagatgtttctttcagacctttaaagatgtcagactctcagtcaatcttccctagatctggacaagggagggccttagagaaagatggcctcccatcagtgcagtttcctccccaggtgcaaatctccccccacagacctgccctctgaacagccattcacagtgtatcaaagaggtatattttggggtgaaatatttttattcccttcacccctagtttatcatgtgtttccttgatgggctgagggcttgacagatgagcagatagacacaatcttagttcatggaaaaggcaagaatagagatgggtagcggagagtttttaagttgctgctgatgaaatagacactcctttgtctcagctactgaaaattttctttagaacgtggatttaaataaagaaagaaatagacatcatgctttgtaatgaagtcctttggtcatcgtaagtggtcacagccagtttatcctcaggcttctttaagctgaccagttaaggtttctgcagaggttctgtgtttgagggaggagaggaagtccttggggaggaggggagcgttctatgggagacagtgctcttgggagcattctttcaatctgatacccatgcaagggtgatgacaaggtatggccttcagtgactcagagcctcctcccttcccaagcctcaggcctgaaagtctggtgatcctccctggcagaaacctcactggggatcattttttccttttgaacaagtttcttactttgcctcatatgttccaatcttctgtcagtggccaggtgacatctgttggaatgctgatgtgtgttgccaagcaaaacagatgcaggaagacttgcccaaagtgggggaagagagggaggaaagggaggaaaagtgggaggtagagtgtgttagctggggagatgggatcgagcagtatttatctatagaacagatatcaaagattgggtaaatcatggcttaaaactctcagaaaagcattctaggttcttgcacatctttgcaaggctactgaatggctcatttttatttcccaccctgcattcagagtggtgtttaaatggctcaccgcagcaaaaaggattaggtattacccttgtgctcaacacaagtctgtggtcagcagatttttaactttatcctagtttattgatatttctgtcagtgaacaggtttaactcttaatggaatagaatctaccaagaataatgcagactggataaaaagaatttcactgattttgattatttagcacattaaaggggacccctggccagaagtagatgtattgcttgggagaggagggcatagtacccaggtggtacttcagggattctgattttcagtcagggttgagaaaaactgatttaagaagttaatgctactgacagcctaaatctgggtttccttgataacctttggtgtaaatactgatttaatgcatttttttttctcacccacttttccttcatcaccccaaatctatattgtgttcacatggttcctctttctagaggtgggagatgtccttttatggctcagaggtccacaaaataaacttgcattcaagcaaggttgtaaaatacctatgcattaagagcagtccagttgaatatttgcaaagcatatataaaagagcttctctcctaaaataactgaaatgaaaggattaattttctctcagtttcctactgcaagaagtaagtaaaagtggaattccaattctagccatggcaagaccggtctatcctgttatgtcttgtgtgccaataccacttttctccaggtaactaaagtatctccctgctgtaaatattaactgagtgcatttttgtggcttttgataactccacgtcttgaaagtgttggccagttgtcaaattttcatgaatttcagagaagtgggtaataggtggtttctctcacggtatttaaagcgaagtagtaaagaggaaaaagactgaaaaggtaacctgggtcaactcattttttagggcgcacagaagtgtggtagcggagcctggacatcaggtggcctgaagcccaaaccaccagctcccccagcacaggagagtgcaaactgtagctcagtcttggccatctggggtcttctgcaaatgaactgcccatagtctggccaataattcacactgttgtattgctgtctttcattctctcttaagtagagcgttctgaacatatctgaacaattttttgacacgctgttactctcctagccacaggttattttatgacctagtcattctttacataaataaacatttatcaacagtgctgtctgggcctagtaaggtatatagcctgctttgtttctgcattaaagttcttagaccgccatgatcttgagatgtttgctgcttattgtttctttctgatttctattgcttatcagttactactacttgtggctccaaggatagaggccgattccctcttctaatttgctgcctctcatctgcttgaagtttaggtgtttagtcaagctcactagcattgtttataaaggaagaataaataggttgagagtgaggacttagggtagttacctttttaataatgtatatgatctgtctttggtctttctccctcatatctctgctgattttactctcgtcctcctggaacgtctctggaatcagatagatttttgtaagatttggatgtaagaattcagtggaataatatatactagctgtttagcctagtgctcggcacatattaatgcttaataaatattagctcttattattattgtttttttccctgaaagagaaaatcttaattcctcacagatgtttaggaattggatatgtagcaaccctatccactgaattagtatcagcaaacacatttttagttcatcttgatttttatcttcattgggattatgcctttatccctttagggttaatgaatttcctactgtgctgttatggaagaaccctgaaaaaaaaatcaataaaatgtatccttaaaaaagattttatgattcacttgactaccaggtgtcagcaacttttatttttattactttaagttagaaggactttgaaggttttcgtggtttattctcttcttttttaaaggccaaaccaagatcactttttggtaatggctacctttcctctgaatgtatttctcaaaaagttctttctggtttttattaaacccaaacagttgttataatttaaaagttacccttttagagtgagattagctagaaaagaaattaaggattattttaagtaactcagcaagtaaccttttccaagaagcttagattataaattaacgaaaaccaaattataaaccaaggtgtatggttgattgtgggttaagaattttatcagcagttttgctgttgtatgtaccagtcgtatattttactactgagtagaagaaaagtctaaaaatcaagtgagtagtttttccttagctggttatcatgtttgtttgatcattatattaaagtgctccttttatttttcgttttgtatgttttcccaacttaataatgaatgtgcttctctctaatctaatctctgaatttcaggagtctattaataaagtatgtgtaaagaattagttgctaattttggatgtggctgaaatgagattgtcagcaaattacaacttcaagcctaggactgcagtgttatggattgcacctcatccttggttattgaagatatattcaaaatttatgaaaaatagaaaaaccttattacttctgaatttttccacgttagactttccttatacttttaagatagtgaaagtgttattatataagatcatggaaagtttgtctttccagacctattttatgttaggattttacaatattaaattcataagataatagtagagactagaaaacaaatccttactgataatgaatttcctaagtagtaaatacaaatgaatatttatttgtaaacctgggtgattaagtaatagctgttcagtgatattgatggaaggaaattaatattatttaatccaaaggccaggcgtagtgactcacacctgtaatcccagcgctttgagaggccgaggcagatagatcgtttaagctcaggaattcaagaccagtctgggcaacatggcaaaaccttgtctctccaaaaaaatgcacaaattggccggtatgtgcctgtagtcccagctattcgggaggtaggaggtaggaggatcacctgagcttggggaaactgaggctgctgtgagctgtgattacaccactatactccagcctgggtgacagagcgagaccctgtctcaaagaaaaaaaaaaaaaattaatcccgaccttcctccaaaaaagaataaattaagtccagaaagtttggtgattcacttgctgttgccgcctttataaacataaaagtcagtaaggctaagggacacttctgaattccttctgctgtccaggtactgtgccgagttctagagatgcaagtagtacataagacagatgtggcccctgcccttgtggagactgcagaccatggctctttttcatgaatggtagagacactcataagtcaaatacctacatattttcatgaatgtgccaaaggaggcaaacaggaagctgagacaggaaatcatggggaggcctacttgaagagaggtaaggaaacccccaactcaggagtggcctgtaagctgaggcctgggaaggacccctgtgggcatggccagtggaactgcagcggaagcagccgttcgcccaaaggtcctgcgctgggaagagagtcagagatgctggaggatcagaaagggatcatccaagtgagtggaggagacagtggtccaggatgagcttaggggaaaacaggggcccctggattgttcacgctgtagaacacagtcatgcatctgatatataaatagcatggagataccctcagtagatgcaaaactcaaatgagctcagctgctctgaagcctgggaaaagtcagcaatttgtaaaattatgacacatccacattttcacaggaaaaacaaagactagtatgtaacatctcctttggtatttacagaggatctctctctctctcgttgttactcttacaaatgataggaggccacttttgttttccaaattctgtgccagatatcttgcctttcctgagatatagacacggtagagtcaggagtgtgtgtgagggcttgcagacttctttttatgtctttagaatccttcttcacttttgaatcatttggtccaggagtttaaggccttttcatttggcttttgttgttcatttgttgaacataaataactgtgttcattatgcagacaccgtgtcattgttgacaatttggtgttgtagattaaggcaacgtgaccatgtaacaagttgggcaaatgcacttatccattcagtgagctctaacctacaaggtgttttgcttcagaccaaaatggtagactgcagaaccttcggcgcggattttaagtccatctttaaaaccataggtagagattgtatctgtgtgttcttctttaattaaaaatgggaaaatgatgcgacagagcaaagacggccatggatcctttttatccctctcccatccacacagagagtttatttcccctcccctggagtccaggctggccttggggttgccctgaagtgatgccgggccctttctacacgtagcctttcaaaggaccggcagcttccacttcctgccttttggaaaagcttgctttagggatccagctgccacctaaaggccctgaagtgagccacgtagagagaagttccagctttctagcccatctccaagtgtcaggcaggtgagtgaagccatcttggatgctccagcccatcaccatccaactatagtcacataagaggccactgatgggcccagtccgtctccacactcctgagagttagtaagtggctgtcgtgttgggctctgaagttgtagactagtttgttagtgacgtataaccaaaagagagagtgtacttaacatttagtcctgggaggttcgaactttgcctccgcctgtacgtgagctccctggagtgtgggatgaaggagtgcttggcccagttgttttcccggaagctggaggagggcagccatgcacaggttgtgtagaccaaacagttcagggatgcacttggcttagacagctgataaacagctgcagtgcccccaagggagttgaaagagtgggtattttgttgtcaggagtagaattattcaccttgaagaacagaagatttgtagtttaaggaaattcaccatattcttaaaagttgcagaaagagaagagttcttagcctaggcctgcaccaagatccagttcttttgaatctgatttaataggcagatgatgaaggacttattcccaataataaagaatagttcaataggaggttggtagtcttaattgtcttccttgtcaaatcctagtgaatttcacatcagatactgtgccctgtgaggctctatcaccttagcacttggtaatacgttttttatgtagtaggtgctcaataaatgggttgagtttctataataatttgatttctgtagcatctgatttaactaagtttgctataaaacgaaatctgctattgtattcaacatcacaataagcagtatcagttgtaaatcatacctacatacagttaacccttgaacaaagtggaggttggggtgtcagcatcttaacacatagttgaaaatcttttgactcccccacaatttaactagtaatagcctactgttgacagaagccttactgataacttaaacagttgattagcatatatattttatgttataaaaattaaatactgtgttctcataattaaactagagaaaacgttaaaaatcataagagaaaatatatttgctatttattaagtggaaatggatcattgtaaagtctacatcctcactgtcctcacattgagtaagctgaggaggaagaggaggggttggtcttgctgtcacaggtgacagaggtagaaaatccttgtataataagtgagctcatgcagctcaaacccatcttgttcaagggtcaactgtacttgaatggatttttttccctgtcataattaaccacccacacacatcttactagaccaaaaaagaaaacttgtcaagcaaataatctcccatttcttgggtcatttggagagataacacaggccaggttatatgtcctgaaagatgagaatgtgtgaagtccccagagagtctgatacgaggccttcttccagggagtagtggtctggccgctgcaccagcctgccccctgccatgccctgactcacctgcacatcatgggtgctgctgatgcccaggcttcatggctgagcatggcacccttagcacccctcacctgttacccaacggagatttgtgggtcggaggcatttcaattggagaaggatggaatggctgagggcaggaaaacttaacaagcaggaagtctgcaccctggctgcacatgagaatcccctatgggcattgaaagtagggggagcattgaaggtagggggagcattgaaggtagggagcagtcaggtcccatttcctaagcggctctgcaggcctctaagcttgtcagtcatctttttggtgctgtgtggactagtgccagcaggaacaactggatagttttaagtctttggcctcttctgacactttttaaaccaaacattttattaaattctcattcaagttaatagcaaaaaaatattactactggtttcatgtttaggtctcatttgcagtttttaaaacaacctaacggagtatagtaaatacataaagtactcgatttaatgtgcattttctttttcgttttttttttttttttttgggtggggaggggggtggttttctgagacggagtctcactctgttgcccaggctggagctatctcagctcactgcaagctctgcctcccaggttcaagtgattctcctgcctcagcctcctgagtagctgggaatacaggcacatgccaccacacctagctaatttttgtatttttggtagagatgagttttcgccatgttggccaggctggtcttgaactcctgacctcgggtaatctgcccacctcggcctttcaaagtgctggaattacaggcgtgagccaccgtgcccagccctagtgttcattttctgacaagttctatgaaacctggtgacttaacttttctgaatctgtttccctatttgtaaaatgacaatacttgcagtagagtttatgtaaggaattaatgagggtaactttaagatctttgtaaatgctaatgtgttttacaattgtggtcagctataataataataataatattattattattattattaataaaatgcttactaggcgaagttaatagctcccacccattcccaaactacttaaggaggattttaagctggaaacagttaaggaaagccgcatgatgccatgagcaaagccttccatctgcacttggcatattgcagggtctgtagttgctggaatgcctatgtccctggttacgagccttgatataattgtgctaaggcattttggtggagtggaccgtgtcctgctgttgatcaaacatttctgtgtggagagactttgtttttcccttggggagtatttattttttagtgccaggctccgggttggctgtgctacgcttggcttttcagtgccaggcatacaaccatgtcagaagggggactgcatggtaggtctcaggaagaagggccgaggaagaggagaaaagggacttggctgtggacggggaatcctgtgtatcttggcttctctgagccagctgtgcctcagaactttgatttgatctttgtaccccatgggtcctgccaggtgaggggcacaatggagaagagaaaaaaaaaaatgctctgctgaaaacataagcaacaaataaaatagaggatagtaatcctaggataatccccgaggcagcagagaaaggcaggctctggcttgcatgtcaggagctctcttcctgggggcaggagggagggtggtatagtcccagatgagtgcttggcaggttgtttagagcctggtagcagtgaaaagaaatgtctaccaggcatcttgtgcatgtggtagatcttgacttgtaattgtggcagtctcccctaggctcctcggcagctaggtgacagttgcctgctagttcatgggtcaccttctcaccctctggcttgcttctcagtgggtgtaaatggggtaattaaaacctgtggttttagactttgctccaaagactgtttctggggttctgcagacattgacctgaaatttatttttattatttttaacgtttaccacctgtgaagatactgtacatttaaagatataaaatgtatcatattaaaataaaatagcctgtatgttttacattttgagattctgtttatgctgtttttttaaaaagttagaaatgtattggcatgttctgatagcttatttttaactacttctccattgttgtaatatcataacaggttggactggctaggctatggtcagaaattgcttatcagtgttttatacatacccaagggattccaacacagggtgtccatggtcctctttgagaaaactttgtctaaaagatattgaatgatgcctcattaaaaactcctcagaaatattttctcctggcttgttttcgccttccgtgtcattgtttgagaaatatccaagattccttcttttttacaattaaaaaaaaaaattgaagcaagtccataatcccatgtagttctttgatagaattaaacttcagataggcataagaaattcagataggctttctctccactggaaatgcatgcctttcgcaatcaacagtgtatgatgtggtctgttctggagttggggtctgacccttcagcatggccagcgctatctgaagatcagaaaccctggaagccccttgtctctttttcatcttccacatctgtctggcgtccaggccctgcccctcctgcctcttcactgccactgctgtggccagcctcttattcagaggagtttcctacctggttagacacttaaccacctccagacggaccccttctaatccacgtcccacattatagctcaaaagtatggattttacagatcttatcctctcctgttctgccaaaaccccatacggtcctccattaccaatcaggtgaatcgacttgcatttcccagcgtgtccccacacccacaaacactccatgacactgggcccgtccctgcctttattccctgtggcccctgtgtgcaggagccttccctcccctttctatcagtccctcatgtacaggccttcagccccctcactctgccctgttcctacctccatcattgtgccatttatgtttgcatgtctgtcttctctgtcatatctatctcaaactaggttgaaaattttttgaagatggagattttcagaataaaattgttcacacagttatatatttgactgattatacttttatttttatttatttattttttttgggatagagtctcactctgtcacccaggctggagtgcagtggtgcagtctcagctcactgccacctctgcctcccaggttcaagtgattctcctgcctcagcctcccaagtagccgggattataggcatgtgccaccacatccagctaatttttttttttttattatagtagagatggggttttgctgtgttggccaggctggtctcaaacgcctggcctcaagtgatccgcccaccttggcctcccaaagtgctgggattacaggcatgatccaccatgcctggccgattatacttttttaatgtgttagttaagatgagagagtccaaagtgatacagcccctgcccccacagagcttccagtctagtgagagaggcaggtaccaaaaagataatgcacatgacagaatggactgaactaagtagtagtagaagttcaaacgaagaagaagacacaaatggataaaagctatggattctcaggattgaggatgctgaaaggctgcacaggatgaaaggtgcgaccaagggtcctgaaaaaggcataggatttatacttgcaaaggagggcatttccagcaagaaggcttggaaatgagaaaatctcgggagaataggcccatgttagaaattcggtacacgattgagaggaaaagaagtgccactggggaagtgtgttgaagcaggtatgtggatgttcttccctatgcagtggtgtcagtaggattttttgttggtgtgagatctgggatctgtttgtaagccgtctgagagctgggactttgcattgatcaactttttgttgcacatgctctgtgatgtaattggcactgcatgatttgacaagaatgtgttttatgctctaaatcaggagtgagcaaactttctgtaaaaggccagatagtaaatattgtggcctctatttagtccattctgaatgtacattagacacaagtttctaaagtacattcacaaataagcattatacacttagttgtaacatacacggatgttgagcagagaaaaagctctctgatttttgtggttcctgctctaagccaggctaagtggtgttgtcagggttccaaccccttccatccctgaagcacactcagcaaaccatctagtttataagccacagtgtgctagtaggtgctgtgtgtatttttttgcggggggaggaggtatttattttgtttttgagatggggtctcactgtgtttcccgggctggtctcaaactcctgggctcaagtgatccttctgcctcggcctcctgagcagccactgcacgtggctgcatcgcttttaaaggtagatgatgcctctggcctttctcattgcctctgggtgtgtggcccatgtcactgtccagcgcattccactgtccagcccattccactgtctggccccatgccactgtccagcccatgccactatctgtgtgttccgtgccactgtccatctgtgtagggaagagagcaccaggggctggcctggtcaggagagctttctgggcaggggttgagggaggcacatgtgagctggactttgaataaaaagaaaggaaagccaaggagcagaccgggcgaggctgggtgcgaagaccagatgtggcagggatttaggaggcagagcgagcacaagtctgtgcatattggtaggttctgtagacttgtcggttgtgcagtggattcatggagcctgtcgaggaagctacctgtgtgcttccactaggaaagcacagccacagagagaagatgaggggcagggaagcagtattgtggggaattcggagtgagggctgaatctgagaaatattattttaaaattatgttaaatacattattttttgctgtctccaaccatcattactatgttcactgtagaaaaattaagaaagtcagtatggcatatagtcccataaccaagaaattcattcattgtgacctatttgagggtcatttaaaaatgactgatgtaatttggtaaaagattaatcaacaaaatgacttatttcataattaattactttccactaatgtgacatttctcaaactctgcagtatttccttttcttcttttcttttctttttttgtttcctgagacaaatctcactctgttgcccaggctggagtgcagtggcatgcaatcatggctcactgcagccttgaactcctgggctcaagcgatcctcccgcctcagcctcctgagtagcttggactacaggcatgcaccaccatacccagctaatcttttatttttttgtagagaaggtgtctcactatgttgcccaagcagatcttgaactcctgagctcaagcaatcatcctgccctggcctcccaaactgctgggattacaagtgtaagctgctgtaagctgctgtgcccagcctatattttcaagtctctctccttttttttttttttaaactggaaaggatagctgtgatggaaatggaagacttccaacagaataccttagttagcataactgtgtagtacaagatgtaaaaacctgttgaagtgggtggccttttgttatcattctgtctttctgcccaccctgtggcacagttctcaccatattttctgtcaactgctaccacatggtccccttctttatgttataaagtctcttaattattaggtaattattcattgtcctagctctccatgcttaccaaacaatattaacaagagcacggtattacaaatgagtcaataacaacttccctaaccttatggcagctgttttggaggaaaaagaaaaaagaaaaaaaaactgcctttttttttcttaatgcgttacaattggttgatcagaacagttttaaaactataaaatgttggctgggcgcggtggctcacacctgtgatcccagcactttgggaagccgagacgggcggatcacgaggtcaggagatcgagaccgtcctggctaacattgtggaagcccatctctactaaaaatacaaaaaattggccgggcgtggtggcagtcacctgtagtcccagctactcgggaggctgaggcaggagaatggcatgaacccgggaggcggagcttgcagtgagccgagatcgcgccactgcactccagcctgggcgacagagtgagactccgtctcacaaaaaaaaaaagcaaacaaaataactataaaatgtttaataaacatattttaaattaaaaggtaaggttgtatctagttatttatacagctatttttaaaagtcaggttggcaaaggtctctctgagtttcacaaaatatccgcgtgagtggtgcatagtttgtgctggcttatttccatttgttcgttgtgtttatggtaaccagtagcattttctaatttggttaaaatgctgtcattagctggtaaatgcagtcctgtcacctcagaggaggaccaagaaggagctctttctagaaagggagggatcgaattactcctcatcctcatatctacttatctatctgattttaagacaccactgaaatttatactgcgagcaatttaaatgaatgcagtaattgattgcaaaacatgtttgtaatatcagtgactgaaattaaataaaagataagtcagtactttttggatcaatccagttgatctaaaaataaaaagtagacatccactgaatggttgggtaaatgaacgaatgaattttggcttatgtcagtgaattggcctgactgggccttgatctacatagcttctcttgacattttgttgcccaaattgagtttgagtgtttttagtaggcagggtaaattagcggtatggatgggtataacattctacatttagttttgctactgtatatgagctcatgaaatggacttcccttccctaataatatagaaaaaagaaaaacctaaggaaatatagagaacacattcaatttgggaaattcccgtctgtatcagtcaaggataggctagatcatgttgatcatgctgcgtaacaaaccacatctcagtgaattaacccacaaagggggattttcttgctcacaatacacaatctgtgtcagcaggagagcagaattatctgtcgtcaccaagagtccccaggatgatgacggctaatcccattgtgccttcaccatcactgccataggtgaaaggaacgtgataaattgcacactgccttatttatttatttatttatttatttatttatttatttatttagagactgtgtctcgctctgtcgcccaggctggagcgcagtggtgcgatctcagctcactgcaacctccacttcccgggttcaagcgattctcctgccttagcctcctgagtagctgggattacaggtgcacgccaccacacctggctaatttctgtatttttagtagagacggggtttcaccatgttggtcaggctggtctcaaactcctgacctcaggtgatccacccgcctcggcctcccaaagtgctgggattacaggcgtgagccaccatgcccagcccatacactgcccttttaaagcctgtgttcgaaagtggcacacatcactgccgctcatattttactggccaaagcaagtcacgtggccatgccatttcagattgggaagtacatttttaccattgcccagaggaggagagagatatgcaatatttgagaatagccctaaagactacaatactatcccttagtccacctaaatgatcctgaggctttggggcaattaaaaaatccttactcttaaaaaatgtcaggcagtaagtcttgaagccagctgctggtgctacacaacatacccttgtcttgtgaggaatcccttttgaaaaggtaacttacctcgtcacttcattattgctcattgctacaggttgaattgtgtccccccaaaaagatatgaaatcctatcagtacctctttgaaaatagggtcttatttgaaaatagggtctttgcagaccctcttgcagatggagtcaagttaagatgaggccatgaatgtggaccctaatctgactggtagccttataaaaaagggaaaatttaggctcagaaacagacatgcacactgggagaatgccatggaaagatgaaggcagagatcaggtgatgcttctacaaggcagggaactccaaagattgctagcaagcctccagaaagcaggggagaccatggaatctccctcagccttcagaaggaaccaccctgcccatatcttgatcttggacttccagcctccagaacttttaaaccatcaatttccattgtttaagctactcaagtttgtggtactttgttacagcagttttagcaaactaatatgctaatcaatatatatttttatcatcttctttggacctagcaaggagaaccacttgggaaattgaaacaaggaccctctcgggaaagtttggtgaaatcctggccaacatgatgtctaatgctgattgcagtgaaattgagtactgttgttgatttttttttcctcaaagtagcttttggaagtgaagagtaaaatgtgttagtgggaactcagtattagcaagaagagaaataagggactatgctagcaaaatgaataatctgtctttattatactgtcacaggtggttatcaagatacagtttttgtgagacaaaaagctttgtggggctggagttgcttttgatggtggtggcagagggagagttatacgaatagaagtaacttctggtagtgtcttcgttgcatgtgggtacacccagtcttatgggcaagctgattttatataatcttgttcttttcagtaaattttgtatatcaaatatttaatcttacttctttgaaaaactttttagataagtgatgtttgcaaattgaagcatattgaaccatatatctggatattttgtttgattataaacccatttttacaccatggccatagagaatggtgccgtgggcactatcaggagtgatgtcattaaccccacagggctatgtggaaagcgtgtggctgggactgctgtgtggttgggacaaggcagtggtgcacatgggccagctcctgtaactttcctgtttgtggctctcatggggcactcctgctcctgctctccccgtcctcatccatgatacatactctctctcatctacgtgctcataaatttcagcagcaagaactgcatgatttttaaaattctgagtagatgcttccagcaaaggatttcctaactgatcactgccagagaagaagaggtgctaaatagttgccaagttacatgctttttttcccaaatgaagtacttcccctgctactgcttgtaaagccctgattgtgtgtgtgcgcagaacccacatctggtgctggaagcctaaggactagtgagtggtcatgtggtttatggcccctataaaaggacccattctaaaagtctccaagaagctaactccacaatgagatgatgtgtgtgtgggtgtgtgtgtgtgtgtgtttgagatagggtcttgctctgtcacccaggctggagtgcagtggtgtgatctcggctcactgcaacctccacctcccaggttcaagcaattttcctgccttagcctccccagtagcttggattacaggcatgtgctaccatacagaattcagattcctctcctacccctagcctgatgccctttcattagctatacaaaggtggttgagtttcaggttaggcttattatcgtttaaactataaactaaatattcaccaaagctagcccagcctaagcccaggaataatcaaggcagcttgaaacctaaaagcaagaggaggctgggttagatcagctcactgtataatttttgcaaaggcggttttattgaaacctgttcttttttgaaagctggctctttctaacattcaaatgcttttgatcaacctattttatggaagcagaatattgaaattaaagtaaatattagatgaactttatagccagttgttttcctcattcttcaactctttaccctacaaatcttatttaaacaacatgttcagcaagctgttatcttgcttacgcaatgaatagaacattatgttctaaggtacagtttgctcacctatgaaaagaatttaacctcttttctaagtagctatacacaattgtcataccttaagttcttatttagatgcatttcagaatattagagcattttgcaagtagatgcacgttcttacccagtgtcagtgtttatagacagacactcaccatgggtatatttaagtctagggtggtaaagaatataaatgtcatttattaaaacctgaacatagccaactatgaattatttgtgttaatgtaaacgtcgaatgagcactgcaaacatttgatgtttgaatatttgcctgtagaagtgcagtactatgttctatagaatataagtagatgccaccccagtcctcaaggtttcagtgaggtcatcattgtatcaataaaggtgccaatttaagatgctaactggacattggaaaaaatttgttgtcctattctgaaggatgagtcttatataaagtgtttttaaaatactttattgaaactgccatgttcttttcaattttggtagctcccctgcatttaatttagtcataagcgtctgtattaatgggtgtgttcaatatgaaggcatcctgtgaagacaataaattatattatacttatctagtctgcactctttatcatgttgataaaatggcccttaccagtaaaaaaactgtttcagaatgtgtaagagtaagtctgtctcagctgactgagggcttcatcatgttcatgataatcccagcagcttgaaatgtcaaactggtagctgatccatagcacacagtagtgctaattgagataggttggtgtggataattgaatttaattgaatattaaacaccagtaagtgctatgctagatgttgggaccacagtgatgaagatgacattatcctgacccgggaggcgctccttatgtgcataaactgcatttggaaattttcatgatttgagagtcatctatggttgccagtagagattttcccagaaggccaaggatatatggggacatttgactgttctttgaccataattatataactttttatttgcccagaatgaacaactgcagggtaacatttatacaaaaggaatttagtgtgcttagagtgctgataatacttgagaaactaggagagctgttttaaagcacttctttttcttttttttttttttgtttttttctgggctgttagaatttgacattgttcaactttaactttgtcctcattgaactttatcctgctaaggagctaaaaggtccatatgatcaaaaaggcagctctcaacccagcacgaaattccaggctcattcatttctgtttacctactgccaaataagtcagacaactgcatacttgctttacagacgaatagaggacagcatgttgttcaataattgtagtttaaaaagtatatgtaagatacatccacaagaagaaagatagagggagcataccgtttgtcttctagtataggctccctgcccatggagatcacagagtagaattatgatgggtgccttagagaccagcctccctcaggatcatgagttcacctcggcaccacagctctgggcaacgtggaattagacaaattaaagtagttaagttctgacttcatagaacagaatctaaacttttgttcatactgcttttgtgttcttgggccatctgaaaaccttttctgtgtaaatattcctgcaatatgcggtcttacagaggtcttatcacgcatatttccctttgcttccttatgtatcgtattttttcaagaagaagacattcaactttagagacaatggaatcattgtgttgtggctttaattcaggtcattgtccttttgtgagttgcacgtgtgcgcgagcctgtgtgttttgcttggaggaatagtgaataagcaaggagcagagtccatttgctttttctaacagagggtggggcagattctctcacaaccattaaagaaaaaaataagataccagcaataatgataatcagtcatgcatatgtaatcgtgtgtagttcatacttcagattcatatacagctgagcatgatcttgaatgttacaggaagcaagcttgaaagtcaagttacagtagaactttgctaattcatgcctgactaatttgcccacccagtagttcctactgaaatcttgccattcctctaccaactttcagaaaaatttgatagcaggctgtggagaaggctcatgttacttcttatgtcaaggtgtaaacaaaaaagagagcacaaaatacatccatcagaccacatgaagtgaagagagagaaaacatctgctgaaagccggattctctgtttttttcctgctttttaaatgtaatctgtctttgtttatgcatgccctagaaacatgcataagtaaccctgagtagtctcttagtttaagaaaacctactataaaatttcttgttgtaaaataaaattctaaaaggaataagttgtggacatataagtatcagacagtttatgtaagactttacataggatgcaaggtaggctgtaatatgatttggtaattgttttatgggggaattttgttttgtatagcgaaaaagaacagtgagtgatttaactgaattttatagtttaatattgttgttgttttaactaaaatctttggtttgctattgcaaaatgaaagagaaaggaaattttggttaatgttaactttatttccaaaaccatgtgatggatgctgaccaaatgtgtctcaatagtgccattgaggtctgttgcctttttttttctttgaggtgctaagtgaaatgtgttttgaaccttgaatgttcactatgcgacgttctttgcattacaggtagatactgcaaacttgcttcaaaaaaactaaaaagttcaaataactaatggttcatatttgttccagttagtaaatatcacgacaaggtatcatcgtcatcccatgttctcagtatagattcagcttcatttcttacaccacacacccagaggcataaatggaagtacacagacaaaaggaaaggcctgagtttaaatgtagttatcatgttcagtgttcgacattttattctgagaatttaagtgtttctactgcagtaccacaaagtcaatctgcatattactttaactagatcacttgtaaaaataaatgaataaatgaccagtgatggttcagtgacaagagtgccagatgagtcatgaatgttttcacaagtaaatttgatagtaaactgctaagtttactgtatacgctgtgtacaaattagctcagattcaagatttttgctctaacaactgaacgctcagttgcatctttaaactttttgttgcgtgagaggggctgaggggcaggtgggaggaagtcagcctgcaggtgggaggtttctgtctcaggattgctgatacccctgcatgctgctgggttgcagccttggagtatatggcctatgagacatggcatgtctgatttgatggaaaaagcagcggagaaccagtgaaccaagctattccgtgtattgactttttaatacgtttactacaagaatctgccttttaaagtacttttaaataaggttataaacataagtgtgttttggacacagcctgcagcaagcatgcctctcgaggtgtaagatgagtcagctacacatgctcaggggcccgttccaccagccacagtagctgcagagggtgagagcaactgaagcaagagaagctcttagtaattaggggaaggaagcctccacttgacaccgcatcaccaccaagtatttattgagtgtctttggtgtgcaaggcaggagaatatcttctatggattctacatatttcagggttaccagagttataaaatcccttgaaatctatatgcacaaattgtaaatacgtatgcagctttttataagtgttcaaattctgccttaattgtgctcaaggatcagggtctcaccccagcattgtataccattgatagtcatgatttccttagtgaaattaagtaaattgactttcagagactttatttcatattcatcatgtccccatgtagccatgaaaaaatgatatgtttaatattcatctatttgtatgattaaaacaaaatatccgcaactactgacgattcaatgatcagatattttactgtaaattaatatcatcataaactcctagacattagacttcagacattcagagcccactcgatgcttggcacaaagcaggcaccaaatacatatttatagaatgaatgaacaaatgaaggaagaaacaaagaaatgactaatgcaccaaccatttatcaggaagtttaacagggaaattcaacaaccagatttgttttgctaatcttattaaagtgcaacatgtttgttgtaaaaatagatccacattcgtcattgaactggacagtctaaaatagatccaaacccattgtttgattatacttcacaaatgtaaggtaaaatagatgatactatctgtcatttgcttgatgctattggcaaatgtgaagcagttaccagcataaaagcttggaggttactccgaatgtatataaacaacagtggctaggctcacaagtgggagagagtctaaaaataggtaggcgatcccttatctcgttgcattgaaaattgtgtttatatgaagtgatattattagaaatgatgtgtgagaaaagaatttctgcaatgtctcctacaaattagagtgagaaaatgtatctttatgcagctttgaacaaaggattattattgctggactgtggaccaaaattttagtcaagttttttttttttaatgaaaagaaactgttcatttatgcagacatacaactttgtgtcctatagagacttgtcatctgctcttaaagttagcaccctatttttcctctggatgtccactgagaaacccactggtgtgatggtcattgaaaaagagagttgtgtcagaatgccctaaaatcttagtggcttaacacattcccaagtttatttctcattcacactacccgtcaacataggttggcaggcattcggatccacagggtcacacagagaaccaggccgaccgacccacatggtcacacagagagagaaccaggccgaccgacccacatggtcacacagagaaccaggccgaccggcccacatggtcacacagagaaccaggccgaccgacccacgtggtcacacagagaaccaggccgaccagcccacatggtcacacagagaaccaggccgaccaacccacatggtcacacagagaaccaggccgaccgacccacatggtcacacagaaaaccgggctgactgaagtttgcactggagcttttcacagcccccactcagaggtgagataggtcaccttttctcattagccaaaactggtaagatggccttccctgaccacaaggatgctggaaagtgtagtcatcttttctctgtgcctggagaggagagagaagtgaaaattggtaagcaatatttctattttaaaagtggttagagtgtagtgcaatgaatctagcaccattggttcagttttaaatggactgattccatttgtctaattctgtgtcagttggctgttttctgacccctgagaataatttagtctggctgattcccccattgtaccaattgcctggcatatgacaaatgcatttttgcctgtaagacaatctttgcctaggaaagacagccctaatttttatgtcttgtattttccagtaagctaatctggagtatcagtttttaagactgatacacaattagatgaaactaattaaggacaaaacatttgccacttttaactgttgataagtgaaactgagatttccccccaccccatggatacagtgaacatttgtcagcagctggtaatggctagtataaagatgtattcagttttcccttcccttcctctccctccagccttccagccacccccttcccaaacatttatgctcatttagagaaaagcaaccccagttctcttacctgggatatcaccagtataaaaagcacattcgtataaattatctggcctttaattacctgtaaccctgtaggaaaccccctgggaaaagtaccacaaaagaacgcagctctgggggtctgtgagaggcacccagttcacacccctaaaggacagagcgagcactcaaacgcacagctttgggtgccctctgaggcgtgcactggctggtagcagtgggtatcaaccatggaagttcacggaagattaaaccgcaagttcccacgcaaggccaagtggctgccaggacttggaggcactgaccctgagtggtccttccacctcagcgtatactgtcactgctgcctctgtggcttcccctttccctccaagtagagatagatgtctcgaggtgctccccaccccagccaggttgtcctctcctgggtggcattttcctttctactctctggggctttcaccaccccactgggcataactctccacaggctcccctgggaggggtgcccccacctcacccgccacctcacttctcagcccctcttcccatccaagggctccctgggctgcccccaccctagtcatgatctcgctcctctactctctcgtagtactttatttttaccttgctcctggctcacattacatgcttatcttgtatttatagatggttctatatatgtctccttttgcatccttttctcaaagctcctgtgaggccagggatggttttatgccttttctcatccccttatgttctagtataatgctttacacatgattaaattctcatcagatgttgaatgaatgagcttattatgcattacttcttagtacaaagaaatatttggaacgtaagctctgaaatgttgatattctgtggatgcttggattacatacaatgtcctaaataaacacttgcctgttaagtagaagtcagtctggaaagtgatacctttagatccataaaatgtttataaggcacatgaatggacaaccacgttgttttttgctcttttatatgtttaggttactgacagcccaaaatacattagcttgtctttgggctaggaggtacctaaagttgtatttttctctcatgtcattttcctgggtttttatcatatccaacttcgtaatgtccaggaatttgagattaattcctcaaacttgtcgaataatacaagaggaaacttgtataatacagagcaaacttggttggtgagtagctgctagagcaaacttggttggtgagtagctgctacagcccatacatggatttgtttcttcaggtggggggataattgtatccatggactcttcttcattaactgacggatcaaattattttatgaagctatgatgagaaatggcttgtgctcttgggaaaatcaatgccaatgtaggtaatgcaccagtctagctggtttttaatttaaagaacaaattatcttctggaatagtaataaatccccctttggaacagcaagaagacatcagctgttggatatgggataattaccatatgtttcaatgtcgtaaaaaggcacagcaattttaataacccaggttgtgtacaagaaagctcttgcttctgaagaatccatcaaccatgcgctatgatcatgtaataataaactgctgtttacttaatgctgtttttatttaaagttttaattaacataacctagtctttgcaaaacatctgattacctttgactcatatgttttctggtatataataatgggttctcatgagttgtttattttataagatctcctgtttactcagagtaaggaaaattttttttgaggtaaggtcttgctcaggctggaatgagtggtgcagtctcaactcactgcagcctctacctcctgggctcaagcaatcctcccacctcagcttcccaagtagctgggaccacaggcacatgccaccatgcctgactaattattgtattttttgtagagatggattctcactctgttgcccaggctgatctcgaactcctgggctcaagtgatccttccaccttggcttcccaaagttctgggattacagtcatgaaccaccatgtccaaccaggaaattttggtattaggaagtttcccacataccatttgtctttggtgccatgaacacctattttgtctaatttttataccaacctttcactttggcacatgggaaatctgataaggaatcgatatcacggaaatacacatcacactttctgcttgccgctttcttccaaaataaacccaaggattccccttttccaccaccaccttaatttagataaccaagataaatgagaaggttttcgcacttgatggtgggatttcttatcaaggctattgaatttggtttggcactgactaattttggtatccatgtgtttttagagtaagttgtagctagggtggtggggtgatggggagactctcactgaatggctctaaattcagtattttattctttaaccaagcagctgttcacacacatttcttaggaagtggctaaataaaaatatggcagccctggaatgaacagaaactgttgctctttcaaaaaccagcagctacaaatagtgatttttcttccacaaatacttgtttttctgtgacattctcattggttttattcagttaaactcccagaccatgttgatttttttttgccttttattttttgagctcataggtaaaaggagttgaagtgattttattttctgtttttgtcttttttttttaagtttttgtagagacaggggtcttgctatgttgcccaggctggtcttgaactcccgggcctcaggcaatcctcctgcctcagcctcccaaagtgtacccagtctcaagtttttttcacattatatatttgtgttctttctgtttttaactaatggtctccattatttaggctatattaaaataacaataaaaacagagcagatacaacagaattcatttggttggccattggagctgtttttcctttttctttttaaactgactttatttttttggagcagttttaggttcagagcataattgagaggaaggcacagaaatttcccatgtatttcccccacacaggcacagcctccctcatcatcagcatcccccaccagagtggtatgtttgttacagttgatgagccgacattgacacatcatcacctaaagtccatagtttacactagggttctctcttggtgttgtacatgctgtgggtttggacaaatgtataatgacatgtattcactattatggtgtcatacagaataatttcactgccctaaaaatcctctgtgcttcatctgttcatccctaccatgcccctaaaccctggcaaccactcatccttttactgatttttacagttctgcctcttctgggatatcatgaagctggtggaataatgcagtgtgtagccttttcatagtggcttcttttacttagtaatatgcatttaaggttcctccgtgcctcttcatggcctgatagctcatttctttttagtgctgggataatattccactgtctggaaatgccaccgcttagttagtcattcatctactgaaggacagctgggttttggcaattatgaataaagctgctatgagctttttaaaaaatagtttaaatgacatatcaatactttaatatttaaaatatctcagtgatcatatagcctcagaaagcacagttttctgagctgggtgtcatgttgagtggtgttagagtgccgtgctgcgtgctcaggtgctatgctgtgaggaaggatgataggagcagattctgtataagcagatgcacaaccacccacagctgcactttggcacccagggcagacaaataaaaagggggcaagatttttttaggggagattcctggcagatagagattttcttcagaatgtacagatttatttttggggggtggttaggggcgacagttgttttaagcagagttttgaaggagtttggtttggtgagtgaaacagtatttcatttttgattgcctttgtttttccagcaagaaagctactcctggtctgtgggcacacaccaaaaggctttgggcaagacagagggagcttgtgtgtgcccccagaccggagtcataccacagttgtcagatcactttgcggcagaccttccgacagtctcctcatctctcttgtggaatttgagtttgacccacaggtagcattttttattttggtggtaccctgatgtttataaggaacctcaggacactattagttaggaaggagattgtcccatgcaattcagccttgcaagagcttcctggttgatctagggacaaggtgtctatcactcagccctccaggtcttttcttcctaaagcaggctttggagcaaagcctgaccggtctttgcctatgactgagtttcccagggctgctgtaccaaactactaccagttcaacttaaaacagcagacatttatcctctcacagttttggaggccgcttcaaagtaggtgtcactgaactgaagtcaggatgtccgcagggctgcgctccctccagagcctctaggaacacatctgccccttgcttcctccagcttctgggggctgccagcgggctccagcctctgccgctggggctgccttgcctcctctgctgtgtcagatctccttctgcatctctcttacaaggacacttgtgggccgggcgcggtggctcacgcctgtaatcccaacactttgggaggctgaggcaggtggatcacctgaggtcaggagtttgagaccagcctggccaacatggtgaaaccctgtctctactaaaaatacaaaaattagccgggcgtggtggtacgcacctataattccagctattcgggaggctgaggcaggagaactgcttgaacctgggaggtggaggttgcggtgagctgagatcgtgccactgcactccagcctgggcaatagggcaagactctgtctcaaaaaaagaaaaaaagttaaacgagtgtcttggcactcccctgtaatcccagctacttgggaggctgaggcacgagaattgcttgaacccaggaggtggaggttgcagtgagccgagatcacgccactgcactccaccctatgcaatagagtgagagtctgtctcaaaataaataaataaataaaaataaacaaggacacttgtgactgcatttagggcccagaacaatcccccatctgaggacctttcatttaatcacatctgcaaaggcattttcatgtaaggtaacattgaaaagtttcaggggtcaggacctaataaattttgtgggccagtattcagcctactgtcccctagttacaacaaggatggggcagcttatggacgagagtgtcaaaaaattcagattctgtcctacagggatcatcttaccctgcagctgagttgagtgattattgagaacatactacgtgttgatgctgttgcttagcactgtgggagatacagagatacataaaactctgcttgccctgaggttgcttgtggttttgttggaagagaagacgtgtgtgtaaaattagtcataagaaaaaggtcgtgtttgatcctgagagccagatagtggtacccagcagtgagcatccaagcccttatctcccaaataggagactttgtaggctgaaaactggcccacagatttattaggtcctgacccctggaacttgtcaatgttgccttacatgaaaatgcccctgcagatgtgattaaatgaagggtcccggtatggggggttgtcctggatgagctgagtgggccctaaacgcagtcacaagtgtccttttaagcccctgctgtgcctgttctcttggtaaatatctctgtgtgctggaacatttgaccagagagagatttcggtgatcatatccatatttgactgtttcctattccataatttgtcgctgtctccgagtcttttcccgggagccccctattacaagtgcacctttctgtgtttattcttccctgttgtgcttcgatgatcccttttttctattcttcagtggctttttctccagtaaaatagcagtttaaattcttgaagggaaacaattaaaaaataatgtctctgggttaacaagtatgattaccgtcatctaaatcagtgatactacatgagaataaaatcaaggagacttacatttacagtagatgaatctatgataatatgccctaccgttttgggtaatttaaatttatgctagttcactctgtctacatgcatgtcatatcttagtgtaaattatagaaatatccctataaaagaaaaaataatttttttctgtatatgttttaagggaacctgaatttctttgggttgtaatgcatgatacagatagtattctgggaatacctgatgttcagcttatccctggaaccctggttatcttagtaaaatatgcagcaacaatatagaagacaatcctgaattttccactgcacaattagggcttgattcaccgtatgacttgggcaaattacttaactttttgaaaccacacttttctgattttcaaagtatgactaataatggtttctgccttaggattattaagatgattaaatgaaataatgcatgtgcaacgtttagaacattgctttaaagtttgtcttttccttctctctccccttttttcctttaaaataaacaaacatgtttgagggctgggtgagttgatgggctccctttagtgcagcacttctaagtaatcactgttccctctggttcattccattgagcacatgatgacaaacatttctggggatatcatgtcaccttggatatagaacagtctcctaaattacattttatatgacaatgtctcactgtatttttgtcctcttgaattgcagcatagcatattatttcttccagcaaaaagcaaaattaaataaataagtgattaagttgctggctgtagctgatactgattcatgacatgactgaggattacttagccatcacattgaattgatgacagttgccttctaaatattatctttagtcacatccctcgaatgtttgcagtgactttcactcctcaactagaatatgcacgtttacatacacatgcgataaggctgaagaaggcttgtggctcagcacaatttggtcttgtatgcacagtaatcattctgaagtgtatgattctgttttattagaaattctcacttgaatttcaagagaataaaggaggattcctcctacacaaagctgctaattgtttgcacactgtgtgcatcccgcatgataagcgatttgagaaggtgccacatcagtgcctttatccaagtgtcacctcctgtctacagttcccttagcagggtgaagggagaaagatgcaaagactgagcttggctgaaacaaatgtatttttgtccccttgacttcttgaattgcagcagagcatatgaataacattgatatatttcttggctgctagacaacaacgtatttctttgacagattgacgcctgaaaagaaaaatacagtatgtactaatgaatcaaaacattttttagtacctttgtgtatactaaatgtattttagtttctatctggagctagttgccatttactgtgggtttgaaatgccctaagttatcttctatggatgggtagaatcaatttacccacacattgacagcttttacagataggtcctgtaacagatataattaagttaaatttcataaatagataggcagtctcctccccagtcctggtccctttgggagatgaattggggtgggggtaatggagagtttcaaaaaggctttccggtgtctttttttaaaaataaggttttaagagtttcatggtcagctgttctcagtttttctcaagatggtatccaaagtaaggctcaaatttatgatttatcttccaaatgcttaaatggtccatttatgatctgccagatgttacaatgactagctccccaaggaacgatcaagaatgtgccaatgtctgggcaagatttttatccagcaaaaagaaaaaaaccataagaattggaggttttactttgaaaagtaaaatcagccacatccatgacttaagagactgtacatattgtcatgggtaaggatttagatcttggctccactgcttactcacagtgtaccctggacgagttactaggcctttctgtgttttactatgctcttttgtaacacagggagagatagcatctatcttctaaggttgttgtgaggattaagtgaactaacttgtgcaaagctcttagaatagtgctgggcacagagtggtgagtgccttgtatatgctaatagttgttgatttatagcttaaaattaattgtgtgatgcaaataggagggttaccaccccaagcttaaatggaagttttgcagcactttgcactcttgaggatgtatctgggtttaatagtaccttccatctagtgcacaagtcttctcccaggctcatcctcccaaacacctctcagtgttatccccactttgcaaatgcagtagtagctgggctcacagaagttaaataactacaccaagtcaccatccaaaaaggttcagggccaggaatagagcgaaagacagaatacggagccatgctctttttgctgtctttctcagtgctcagttctcagaattactcaggaatgagagcagagaaactctgtataggccatgcctggagttttttgcacatggcagtcagagagtcccagctcagttcagtgcagtattaccgaattccagtatatgctgggctctgttaggtgcaaggggttccaggatgaatgagtctgtggcccagtggacaaggtttgcccctgtgtgcagctctgtctgctttactagatttgctcctcagattctaaattggaagtatgtgcatattgcttgatttacagattattagagaatttttttcagttaaactttgtccaaaatagacactaagggcaaaggaaactggtattattacagcagggtgtatctcataagctctgagaattgtacatgtataaagaatctttgaatcgccgagtcttagccccacgttttatacagcacagaaatacagcacagaaagtttaggtgatttcccttgggttccatagtgtgttagtcaccaggttcctttaactctctcagtactctttcctttaaactatggaagagctcaaatgattaaatcaataaaagaatgacaacttatagagctcatttacgtgtctgaatatatcagtttagcccagagtatctgaactcctgggccattgctattcactgaccccttctcctcctcgtgttctagtaaaattcagcccatgaatatagtcattagaagttgaattttaatgaaattgggcgctttgatcaatgggaaggttgaaagttatgtgggaatcatctatatagtttatagctgtgactatgtaggccagctcctaagtgccccctgcaatgtgtcactctctctggttttctttccagggaggtaccctgtagaataacagtctaatttacctctcagacatctgctgtctttcagaccttatgctagttttgtgcatatcttcatgattcctctaataatgcattggattataaactattatctccacttgagagacgctcagagaggctagggagcttactcagggtcagagggagtgcagctgaacagttctgccagggtccctgtgattgttggagcagcctgtgttttttcaagctgttgtctgtgaatcgtacggtagaaacatggtgcgtatttctgcagccttagttctagccattgaaatatcatggagttgaatgcagaatacccattaatgtttaggatgaccaagaaactgtgcccaggccccaagcccagctctgtcatcagaggtgagttaccactggtgccatgccctttgattccctacaggcgccctatggaggtgcccaccagtgtgcacttggaagtgtgatggaacgcatcacatccccttgttgcccctgccccggtgatagggggattcactaagaacttcagcatagtgagagaatgtaactgaagctcctgggttagtgctgcttggtatcccagttactttgtagatttcggaatcttttgtcgtctagcctgaggattactgttgatgacacaattttctttgggattataggcttcatgtttcatacaaccagcatatacgtaaatggcctcttcagtgtatcatgtatacacattggtgaatagcttcccactagataatgttttaaaggggaaaaaaagaagtcatttctaaaatcccaagagagtgtccccgttttgaggttagagcacgttttttagccttatttagtcttgcatcttgctccttatgctacctttcattgctttatgaaattattttttaagggatactttctaacattccatcccactttttttaaagctcgttcatatactttgtcctcacagaatagaacagggtttctcaaattgcacacactgaactctgcaacacaacagttccttcattggagaccagatgaattgaaccactggctttctgaaaataactgtatgctttccagttggccagccttggcagggacccactactactcctatttctcaacagtcaatttaaaatattgacagtagcttaataacattcaatagtaacttgcagcagcctttcatataccctgacatctgagatatgtaccagtttatgaaatagaacacgcagatggtcttagccccattttccagatgaggacccttgtccagggaaggattggtgcccatttagctagctctttcccagcaagcaacagtacccaaggctccatgccccaggcctgggaggacccctcccacggcgtacttcagatctccacctgtgactttgaacacatgcttcgaggtgatgtacttcttggagatagtgctttcctcatctcttctaccttgtagtcgtcagtagagggcatgcagtgcaacagaagtggatttcaggactgagactagggtgaggcaagagaggcatcagaatgcaaaagtgaagtagacacctgccgtcagcactgggcagccctgctcctggggccttacttgactcatcctggtgggttttccaaatggcagaggtgcacaaccacttcttgcaagcatgggcacttgaattgtagcccatgtacacagtgattcttggaaaaagtcatgagtaatgaatggaacttttctctcccaggttgatcttgtgttttgagacataaagagtcaaaggttggtgcctaggatgctcattcttattgtttttggtagtttgattgttgaaggcttttgacacgacattgaagtgaatatttggggcattttgctcctctgggcttttctctaaagcaccctcacatttcctctctcatgttcctgggctttcctggctttgatgctagccccactgtgtgttcccattaatagccctatgtagcctggctccttattctggaaactgtgtaacttttgctcttgatcttaaacacaactcagtcttgcaaggagctccgcctttggtctcagcttcttggggatttccctggcagccacatagtgaactatgtcacactctctgttttacccgttaataaggaaatactctggtacatggagctttgcttgctgatctttttctaagtactctgggggcaaaaggaaaagcagctagaggataaggatgtaactttcttcaaattaagccatcctgacccgtggtagagattagccactaagaaatagtggaaacaaataactgtttcactcttgagtgttagcatggaagagattctggttgaaatcctagtcctgccactttctggttacagaaacttacattacttttcttttgatgtttcaaggagataggagttaaagaaaaatgaacaccagattactagaacattcttatagagttgcccaaagatggaatggacaccttccagagtggaggggagggagtaggattggacagtagtcctcaactgggagcacttcttccccctgaccccacacctgcctcccagggacgtttgacagttttggattgcacaaaactgaggggtgagagttgctgctatatctagtgagcagaagccagagatgcttccaaataccttacgaagcataggacagccctcacggaaagaattatctagctccaaatgttaatgatgctgactttgagataccctagtcagaagtaacatttattggccaggggcagtggctcatacctgtaatctcagcactttgggaagccgaggtgggaggatcacttaagcccaggactttgagaccacctggacaagaccctgtctctacaaaaaaaaaaaaaaaaaattagcctgatgtggtagtacatgcctgtagtcttagctactcaggaggctgaagtgggaggattgcttggacccaggagtttgaggctacagtgagctatgtttgtgacactgcacttcagcctgggcaacataacaagactctgtctcaattaaaaaagaaagaaagaacatttgttgaatctaattttcccatgtaatatcaatgactgtgcaagataaagtggtttttatcctcactttggatgagattggcctttggtgattgagaaaccttcctttggttgttcagctacttctagatagacatgggattttaaactagccatctatatgtccaaaacccatccgctttccacaaacccattatgtagttagctccccatcactgatgatgttcaaagctaagcagggtgagcaaccacttgaaagaggggatggatgaggatacaagcctaagatgtatgttgcactaaatgacttttgaggtccctcctaaagatcacattctctggttctattttgaaatgggatttgtctttttagccccagtgttagagtggcagccagatatcccttggctatgaccagtgaaatccctgtgctttgtgcacctgtgaatcttactcctattaatatcccagccctatcaggccagagggctagggttccaaacaggggcagccagaaatgcaccatcttctgcatcccatctgcattccgggcccaggcagttatttttacctccatatgtaaatgggcccagcgatttctcatttaggagaacagcagaggcacaagtgaggagagctggagaaggaggggaacctatcatatactctgagattgcaatttagtatcagtttgctgatcagtgtcactccactagtttaataagtaattatagtttctcttttgtgaacaaggaaaacgggtagcttcacccagtggttgtcagccctggccaaaaattagaataagatagagggcttttaaatcacacctacaactgagcccctccaccagaaatttaattttctgaggtgaggcctgggtacagtgatttgagaactttgcagggattccagtgtctaagcagcctgggcacctctggttaatggcacacctcagtgctgcgcattctgctccagtacctgctggtgttactctgtcataaagagactagaaaaagagtgagttgggccctgtttctcagtgtgtcttcagtggattgtagggagaaggaggcccatactctctgcctaaacgagcacctgctagactccgaaatctagttaatggaagtttctcctcatccttggacatccttgttttatatggtatacgttcaaaatacatataatctttggtttaatttgttttacaaagttttgaagttttcctctccacacttttctcatcaagctggtgtgtggaaagaaggaatttttcttttccattgctgtcatctaaaattgttgtgtcgggtggggaggggagggagccgggagacttagctttaactacttagaagttttcagggaaatgtttttataacaacctagttaatagtttgactttatgatagattctgttccttcattattttgtcctccagtggcttttatacccagcaaagtggaccatggtgtatgattcaagaagggtgaggagtatgtctttctttggaaaggcagggatggagggttgtgatttagaaagggtaagcaggaaaggagagccacagaaggcaagcactgttctcatgccagatcggtttcaaggaagaggacatatggaaggatctagaaaatgatttctctagaattgtccatgtccaagtcccctggaatgtctttgtatatccccagagctgtgcatgctccagtttgaagagctctgctttaaaagatatcaggggtgggggagatgaggggggtgaagtaaaagaataaaaactattcaattccatttgttttctctttcaagctcatacgttactcatttcatttttatattaaaatatagatgaggaaggaagggcacatggcaagatttggcaagcataatccatgaggggatatggagttggggatggcagcatagcatactaggatttttgaggagggattcggggagcctgttcatgttttccttacaactctggtacatgaagtacaggttctgcatcatgatggaagactgcctgggttcatgtttgggccactacctactagctctatgactttgggcaagtttctttcttcttttttttttttgaaatggaattttgctcttgtcacccaggctggagtgcaatggtgcaatctcagctcactgtaacctctgccttttgggttcaagcaattctcctgcctcagcctcccaagtagctgagattacaggcaaccgccaccacgcccggctaatttttgtatttttagtactttagtacagaccgggtttcaccatgttggccaggctgttctcgaactcctgacctcaggtgattcacccacctcagcttcccaaagtgctgggattacaggcgtgagccaccatgcccaggcaagtttcttaacctccttatagcagtgtttggcacatgatagatgagctacaggttggcttgttattccttgcaatcctgagtttctccccagagtaaagctggagcttttcccccagccaactttggtggagtccactgggcagagatgtgatttcagccaaaatatggctaaaggaggaaaggatctgagacagccaggtggaaatggctccccgggagagcctctgaccgacccgcacactgggaggagtgcgcactggggtggagccttgggaagttggagccatttgcagcagggaggagcctggcccctcgtcttcttggatggtacctaggattcagtctgcgaggcaggaagcacactagcaggactccagcttggtggagagttcctgctttcctttttttcctttttgtccaataaatcccatttttctcaccctttaaattgtgagcctaatttttcgtagtcatgtgacaaggacccctcttaagctgaactaaggaaaagtcctgcagcagatctaactagaatgccaatgcctacattgaggctgtttaatggagagtttatgaaaagttagctagtgtccttgtgtaaacctgtatgactctagttcagagtcttcagtaattgcaattcaagaataaaaccacacggcacttccattcccgtgtaatttgttgttgctggcttgtgacattctacatatcccaactatgagacagccaggcagtgggatggactgtgaggttcagatgcccggagatatgtgaggaagagcttttagcaataaatatgaaaatgaaatcaaagtaaaaactggcattgaacccctggtgtacttaggcttacttttacccaaatccaaatcatttcttgacactgcatggttaccaagagtgtctgtcattcaatatttcagattaagatctgttctttggtagctaagttcagagaaaaaaatataggatctagaagtatcattgctattttttccttgatacatttagtctggtattaaaattgcttgcagaagatttgattttaaaaaagtagaaaagagacacttatcctggtaaaattatcctgaaatcttaagaaattaagacaaattgcaccataaaaccagaagcacaaaattaaacaatattatattaagagaacccagtgacacattttccttctaaattaactttaaaattaacttttaaattaagttcaatctcatatcagtttgctttgtaagaaatagaatatatgtacatgtttgccttatttttagcatgttatattcattaaaatgttttagtttattcagcagatacatttagcatttctttcacaagaaagacagtgaaggaacaattaataacaggaccccagtaatacctggggggtttctacatctgcattttttgcaaaaatagaatagccttctaagaagctgtcagtggcatttgtgcagctggacagctttgcagcagatgtaacagtaactgtgatgccaggctgtgccccagaacctgtaagcatgacaagctctggcttcttccctcctctgaaaaggtacaacattgaagaggcagtcgtttcccctagatctgtaaccaagcacatctgggtgaaaggggaagacatctcttcacagagaggagaataaaggcggtgaccatcagggtgacaggcagcatggactgttgccacctgtgctgcaggcagcttcagtgcctggatggtgggacagctggtcctgcactcagcacgagtctcaggcagtggtctggccgcgcctcccttgggctgcttcttcctccaccgtcctccacttttgctttgtgtctgcgtcaagtcagtaacgttggtctgcagctcccatccctcctgatgggcactgcactgaggccttagtgggcattacctgatgccctcatcacccagtgtacaaacacctgctgacaagaagcgtccctgagcggaacccttctgctgggacaccgcaccttccgtgtcctgagtgggctgcaccctcgtggtgctcaactgggtgacttcacgctgtcctcagcgctgtcctcggcgctctctctccagtcagctctcctgctcaggcacctttttgggacacagtccttgccagttattccctgtttaatgtcctcatgtgtcttcacttgccctgggagactgtcgtcttgagagagcaagccatatgggaccctgaggcctggcctcagtttccctcccccccactgccccacggggccacgcctcatcagtggcatggaccttttagtcagcgagccctcagccggatgctcccgtgctggccactcctgtcatccctgctctgtcctccctgcaaactcctccctcaggaccctgcttgaagttacgtcctgcacagtcatccctggccttccctcagcagaatctgtcactccctcaaggtgtccctgcagtattctgctcatgcccctgctacgtggcagaactctgttgtcctatcctgtccagagctccaaagcccccagaccctgtggctgctgagcacttgaaccatggacagtccaggtgaggatgtgcggggagagatgcctcctgcctgtggctgagccctgcctgaaggagctgatgaggaaaagctcctaagcacaacagtgctgctcacctgggcatctagttggcagagtcctatcccagtgttcgcacccccagtttcctgggtcttaagttcagattatcaagtgctcctcctgcaaaaaaaaaaaaaatggtgattcttgtggcccttagttgaccccgcacctgggatatgcttatatttggtgtggggcagagaactgagtgttcttgaaccacttccacccaaccagagggaggtggggacatcaggtacacctcatcccctgatgtcacagccaagtacctggagccaccaggactccctctgagcccacaaaggagtgtcttctcaccaccccgattatactggtctagttatgctttggagttaaagccaggctgctattgcagggctgctgcaatccttgcaagcacagttgttctttgcttgcgcttgctctcgctctcgctctcactctcactcttgctcgctctctttctctctctctgacttcagtttaactttttaaacttcagtaataagtgttcctcaaaatagatggtcttcctggttgtaggtacagccagcagggttgagttctgctgccttccagcatggttttcctggggcctgtaaaagtcctgcaaatttgctctgacactctgttgacatggaggtcctgtttgttgttataaataaggaccagtgtctctaggacacaccttactgtgtataactgaatggcagattttgtcccttacttcttaaaaattaaatggcagaggagctggccatgtaaaagccctgtgtgtgtttaccaaaaagtacttgaattttgtttgggttttgtgttctggtgcatatgaagtgaattttggtaggagtatgtgcattcagagaatatgtcatcacacttttttctttatttgagtgccacttggctcttatttgattaaggtaatttcagtgacatattttgaagcaattcaccttgaaaggcagaggcaccacccaggtgcagaaaccttccttgggttatgcaacgcccagcgtgggtggaaccgcactcacactttacctcttcctgaaccacagccctgctctgattgcatgatggaagctgaggtgcctgacaagtggaaggaggaaaaggaacattctgccttccttttctctgtaatgccaaagctggcgtcatgcattactgagggcctctgtcagcactggggccggccagtggcacagctgatggggtagctgcactcgctagtcctctgggaaagcccaggttgtttttctggcttagtgttagaggcagctgtgatgtttacctcgatctgtaacatacaaagatctgatcatatgctgtctttgcttacattctattattgtctgacttatgttctaaattctctacaattcccttccatttgtcttaagaaactctaaacctttttttttttggaaatcactacttaatgattttgaggatggaaccccagacagttggtaatagtggatggttttccttttctgtagttgagtggctttctaattcttttgatggcacacaaaaagaaattaaccttagatcacaacttagtacacacatttatgtatgcatgtaactgagatgagttcctcaaaatagcacatacctgtgttttatgtgaggcactgatattttctgttctatattatgcttaactttaaaaaatacttcctgtgtaccatttgtgggactgtaactcacaacttaaaaaatattaccttgatacatagctccagaaatacacatgggtcattttaccaagaatcaccagtgcttttgctctgttaccccggctggagtttggtggcacgatcatagctccttgcaccctcaaccccctgggctcccagctgggggtctttaggaccccagcgtgacctgtgggtagcccttacttcctttaatacttttcttctgcacagtcaggtgctctccctttgagcttccgtgtgaagttcactgtgcacccagctctgctaccaccgcctctgtcttgaaaggaatagggtggggtggtcattggtgtatagtaagattcgaatcacatccttcaagtacagttctaccctaaagataagagtccctgtggtttttgttgttgttgttgttgttgttgtttgaatggatgtgttctttgagaaattgagtcttgagtattttgtgaggacatctaagcctggcgtccacgtcagtgctgacagatttgacctagtgtgcactcccatctggggaaatgcccataggctataatctctttcactggagcgattataatagcccccgggcttcaggtcccagtggcatccacccttggtggcagcatacccctctgcatgaacagggcgcccacttgtcccctccttcttacttagtagtgatttttaaatgggagggtggcagtcctgaatgtagttcatcagtatttaccgcacaagctctaaaggacacagtgttttatttgtgtatttatttaacttttccaatatcggaatatgaatttttgtttcacctgataggacacgtttcaggggctccattctacattgtcatttcacaggaaaaatatttgatggctcattagaagggaacatctattattttgttactgaaaggcacattttcaaccttgagaattggatggcaggtaatggcatggaaattgacagcattttaccacttaaaaataaccacaagaaataccaatgttcaccgaatgagttgaagttaatttggttttgtaggctattgtagttaacttgatgcttgatggaaataattttgtattggaaatcattaaaaattgatttgattaatgcttttataatgttggtatgaggtgttgcactgtggtggtgatgacctaagggtgctgtgatggcctcaaacgttgtccctccggggcccacaggcaggatcccacacactagcacacctcccagttcctcttaccatcaaacagaggtgttccttcaacatgcctgctcctccctgtggcataaaggcaccaggaggttctctgatcccctgttagatctcctctgcagggttgaagacattttttgtttgtttgtttgtttgtttttgagatggagtcttgccctgtctcccagactggagtgcaagtgacatgatctcaactcactgcaacctccgcctcccgggttcaagcgattctcctgcctcaacctcccaagtagctgggactacaggcatgagccaccaagcccagctaattttgtgtttttagtagagatgggatttcgccatattggccggggtgatctcgaactcctgacctcaagtgatctgcccgcctcagccttccaaagtgcttagattacaggcgtgagccaccgtacctggccatttttgtttttaatcggtgtagtgtccctaacctaaatatttcacatggcctgaactttctgtagttttagcagcaatgggatgctttgaaacctagatctctcaccaactacatcttccattgactggtgaaacactagtttaagccaattcattttgaccatgtgcatttttgtgcttgatccctattttatttcaaaaataatttccatctctattcatgtaaactaataagagccttccgtttcctttaatggcaaattgtctcatcttttactgttttaaaacatttttttaacatcatgagaaaacgtgataaaaggtataagtgtagtttcctggcttttgcagtacctcagggaattcggtaaactgtattccatttgaggaaaggaacggttggagtaggaggtagtgtaaagataacatagcaaataagcattttaccagaaccctctgaagtctcatcagactgtgccatcatcagaatccctcccttctcatctacaccgtttaaagccagcatccagtcagaagcccagagctggtaccgccttgctttcctgccagttgctgacatatggcacacagtgtcagttaagggcacaggctgatgggcagcttggccacatacctctctggcttcctatctgtaaaatgggcacaatcattgtacctgcctctgaaggttgttgcgagaactagacgcagccttggcacagagcccacagagagtgagcactgtgtaaagactggctgccagccattagtactgggtgcctgtcttttggtgtctgggcaaagctttaacctgttttatcagtttagaactcagatgtctccctggcaaaacaacacgggcatatagatattttgtgaagttttgttgaagtgcacttaggttaatgattcatgggcagcctttcaaagctatcaggctgtgaaacagctttgaataagattgtcttgtccttctgctgattgtcttttccttcccacattagcagccatagcaggaggaggagaggtggcaagtggccacactactctgctcacattaagcagacaatttatggtcaatattcagtgaatttcttttttttatagtacagttaactgatatttatattagctttaaaattatagcaaaatcaggccaggcatggtgactcacacctgtaatcctagcactttgggaggtcgaggagggcagatcgttggaggtcagatgttcgagaccagcctggccaacgtggtgaaaccccatctctgctaaaaatacaaaaattagctgggcgtggtggtgtgtgcctgtagtcccaattactcagtaggctgaggcaggagaatcgctttaacccaggaggcggaggttgcagtgagctgagattgcaccactgtactccagcctgggcgacagagcaagagactctgtctcaaaaaaaaaaaaaaatagtgaaatcagccaaatagagaactaacaggcacactgcctaattccttgtgtaactgtcattggtgtgagtcactggggcagcgtgattaggtctgtgagctggatagcaaggctgtcattattctcaaggccttctgctgactgctgctcttggtaagacatacagaatctgtgggcacctcctcttaccgctctatgctagatgaggcgtctccacgttgagttgtagtagatacagctaagaaagtaaaagaaatgaaaatctcatcaaaaggattggggctagtctcattcttcatgcatacccaaaccgtggtaactttgatttttttattatccagaatggattgtttagaggagacagatggctttccagttcatcaaattttttcaattatctaaaaggaattcctacgcttggagcaagtcatttcaataaatctcattcatatttacctgctgcttccttttaaatggaagaagagaatgtttttcaagtacacttgaaaaatagcatatgtgaattagaaacttcctctgtaaactagcagagtagaaataagaggccaggattcagcaccaggtaggctggattccttcttaggtggctcaagctggctatggggctggtctcatcatatctaaagaactgcccagcttttacgcattttgaatgtggtggaaccagctgcatctttttatatgagagcggcaaatagtcattgtgttccagtttgcttctcgggtcatctaaacatcagaggccatgccacaagcaccgtaactgagggatatagtgtgactgtggtccaggccagtgacctctggagctgaatcatgacttcccagatgactcccagagcctgagaggggactggtgcgtggctccaaatgattttcacctgggcctctttgaagtcgggagagatacgtgcagtatggtagatgtggagagggagaggcatggtgtgtccaaaaattagcaggacctgatccatatacgtggactctgaagcagtgcacttactagattaaaaaaaaaacaatgtacttactggatttaaaaagtgtgtatttttttgtgagatgcagtttgtaagatgcattggtaactaggccatatactttttccattggctctcagctctcaagaagctctttagtttttagcattggatcagtaaacacttattaaaatgttcccagcatttgtttgccatcttctctttcagctgggcccagctgtgccctcaaaccctgcctgtctcttccctgactgatcatgttctcccagcttctacagaggcttccatagcattgtgcttggtagcagacaccagacagaatctcagccagctcagtccaggcgcacgggctcctggtctcccggggtgtggttactcgtgtctcctcggggccttccgccctccacattccagtgccaggccctggacctttgtctctattcatgataaaacatttttaggaaatgctgacgctcagtgaagaaatggaaacactaactctttgttctcttcctaacagacacgagacgacttcctgggccaggtggacgtgccccttagtcaccttccggtaaggacagtctcatgtttgatgcttcgtgctgggggcgggggtttctaattgtttgtagtcagngtattttcagagtggcatttcttcaccacggtgnagaaggctgaaatgaagcacgtgtgctgtggccttagtcctttctggaaagtggtcctttcaaggggatggaggagaagctggctgtaagagtagtcaagggtgcctgagtcgtgcgcttgcgttcccatccaccagctccctctcttttctgcacttcagctgctccacctttgtgtatcacatcttacaaaacagacacctccttcactcaggcctcccttcttgtcacttactgtctctgcttcctaatgcatcctccgggtcccatcagatgtttgcactctttgtctggaaccgcacatgccatttctcttggattcctgtacacaaactataatagcatttcccagattttggtgtctggctttctcagtcagcatggtgacaaaagaagagcctgttcattctgagtgaacttgtcagctgggaacacccaccctcgctggaacacgcactgagttagcatgtgtggtgctgccatttctctctgctcaaagtagcggagcagtcgaggctgttgactagtgacgggcattagggctgacacccgaaacaggaggcagggcagacagaatgtgtaggtaggacctggaggccttgagaaaggtggatccccatctcctattccagcttcagttttccggcttgtcccagccttcctcctggccttcttccctgggcagcacaacgacgtgatagaagtagcagctgagagaggaaaggcgaatgtttctgccttacaagggcattgtgttatttttttaaatgctttgtgtgagcaaatagcataaatagtctataaagtaaagtgactttactttatttactttatttaaagctatttaaagctagcataagcttcctgctgtgtggaaattatggctgtttccatatgttaaataccaagtaagctttgaagatgtgttgtgaaggaaggtgatagcaagtaatttactcttactcactcaggggagctgttaaggaagaaagtcgcaaggttccaaaggactggaagtgaaagtgatattcttaaaatatcttgtttgtttctttttaaaactctgaagctccagggtgccacgggaggggcctgcccagggcttctgcgtgagaactactccatgagccatcagaaacctgactgctcttctcaggtcacgttgggaggatgtgactatttcaccttttgtgagcaaagacctcgcatccttctacgttgggaggtcttctgtgtatgttcttcagactgaagctgcgatcctctcacacttttagacagtgttggttgatgggccagctcttttatggacgtctccagccaccctttccctaatgtaaaaaccacatcttggccaggggaaattattttctgagaggcaaatattctaatatttggtaagaggcaaaagtgacatgtttaaaaaccttgctctgacaagctcttttttgagtgagtgagcagcacctggtcttgaaaggttgagtagggctcccagaaaatagaaaaaggttcctcctccgaggccaagtcagtataaagaatagtttagctttggattctgagtggaggcagggtcagtgagccttcaaagaaggaagcggtgcagaggcacagggcaggaatagaagccagccgattgcagagggtagagccgtgaacgcccagagaggaccgagtgcccctagttactcgtgtgcccagagggtaacttgcagtggcgtgcttcacctccatacttcaaactgactagctgttcacagccaactatagtcagagagatggaccacaaagaaaacaaaaggagaggcgtgaaggtatattctttattcatgtggcagtagaacccaagttgcgtgttctgaatgcacgtggcttttgaatccaggatttcaggtgctttcgtgtgtatgtttggtcgtgtgtataggatgctcatggggaaattacagtggcattctgtttgtgtgatagcacacaggtatgagtgtggagagggcgggagcatatgcgtgtattttgtggatcgaattatggatgctgtgttcttgattagtatatgaccattgtcaaggtggattattaacagtctgtagattcaaaatttgtcaaaaccaccaagctttagataaaaggaaatagaccaggcacagtggctcatgcctgtaaccccagcacttttggaggccgaggcaggaggatcgcttgagtccaggagttaaagaccagccttggcaacatggcaagaccctgtctctatagagaaacttaaagattaacccagcatggtggcacatgcctgttgcctcaactgtttagaaggctgaggtgggaggatcgcttgagcatgggaggtcattactacgctgagccgtggttgtaccactgcgctccagccttggagacagagcaagctctccttttgcttttacattcagagaccaagagcaaacttagctgtaactgtaccatcattgacttttcaactgccgttttcacatttgtctgttaaattcagtgcatcgttgtctaaaaattcatatgatatttgataacttgaatctattaattatttagcgataaagagaactctgagatctgtattaacagagtgagatttctggcaggtgtctgcctgttgcaccttcctcttgacttgtcagctctgtctccccttcccctggagccctcagtaacccacctttgcccagccacaaaatctcttcgtccctgggaaaggcagtggggcagagagagctattttaaaacattaagttttcctaaatcccagtcatgtgccacttaagacaaccatggctgactctggaatttaaattttcctagatgaggcattttcagggtggtggtattatttgatgccctgcctgtacttggaggtagctcagctgaccaacatccttttaccccttttgtgtttatggctgatggctggtagcaggtagcaggctgatggttccctctcatgagtgcagaattcaaaatcatggagtttggagggacttcagagacactgattcactcccagtattttccaggtgaaaaagcctgggcccagagagggaggggacttgcccagcaataagcaggtcattggtggtgctggatctgaccctggctctccagcatcattgtgagcctgtgatgtggtcaagggtgtgggcatggggtggattcgcccaaggcttaggtgcttgcagtggttgcatacaagtttcgagtctagggacccagcagggccctctccttccatttgcctgcagaatcctttatctcactctattccatagtgaatgcacctaggctgaaagcaactactctctttcaagatgaaagtactgagtatccagattttcttctgaatgcttttaccctggaacgggggcagcattgtggctattgtggctaatagcactgtttgcagcagtgtgtttaagatggctttccaccaggagcaccctcaaagccatcctgggaggctccactcagctctgctccagggaacaggatcagattggaacctggatgaatgccaagaagaatcttgtagttatctataagatcatcttctaattcaggctagagaatttcaatgaacgtgaactttgattttaatgccctacctgttactgcttggcattgagttggcagtactgacaaatgatatgaacgtgtagaattggccaatgaacatggctagtgtttgttgagtgtgccaggtgcccttgagaactttatagaaaccaactcagttgattggtttgatcctcacaacagccctgtaagttatggttactgccccattttatagatgaggacactgaggccaagagagataaggaacttgcccttagccacttggctctgtaagtaacaaagccaggatgcaaacctaggagatctgccttttgacctgtgtgatatcagtcatttaagctgcatagggtatggacagactcaggttcagagtccctctaagctccgtggttttccctcttcactctcttgcatgttctctgctgctcctagattgctcatgcccactggtgatcctgtaggctttgtcatactgtttgatttcctatgtttaaactgtcctttctccctgttctctacctctcaaagccttcccatcaccctgtattgtattgaactccacatccaaaaccattttgatttccaagtcagagtccgtctgttccctgtaccccaagtctcacagaatgtaacctctctgtgtcagtgaatttgttctgccttagcttctagtggattgttgacatgatggctcttcccttgtaattgtaaccataaggactgctataccatgttgtatccacatgtcgttgacataatattgctctcaaattatttgttggttggcagggcatggtggcttatacctgtaatcccagcactttgggaggccaaggcaggaggacgtcttgagctcaggagtttgagaccagcctgggcaacataggaagacccccatgtctataaaaaataaaaatattagccaggcatagtggcacacacctgtggtcccagctacttgggaggctgaggtgggaggatcacttgagcccaggaagttgaggctgcagtgagctatgattgtgcccctatactccagcctggacagcagaagaccctgtctctaaattaaataaataaatgttggtttaataaatgaaaaaaggaaggaaaaccagcaatagttttcttaataaattatccatttatttccttatatatatttacaaaccttttggtagaaaatattttcaaaatgtatgtttattactgcctcataagaacagtctagaaaatataatttacttcattcaatgatagtgaattttgagagcctccatagtttactacagatcagatgaattgagtgcttacgtgagtacctacttggtgccaggcaatgttcttggcaccggtgatccaatggtgagcaaattcaagtctctgttctcatgggcttacattctggaagtgatggataataaactagtatgtcaacaaatgaacaggtactttcagaaagtgatatgaggaagatacagcaggacgataggatggggggtgataagggtggctgatggtgggaactctaaaggatgagacctgggatctcacacttggatggcaaagtggaaacagccatgccatccagagtcagctgtccagcagagggacctgcctgtgcatgggccctactgcagtacatataatctgcatccatggcagatgaggacaggatggttgggagtacaaggaaggaagagagagactggttcccaatgaggttaaagttgattcaaggccagattatagttggtcttctaagtcataggaaagaattttcagtttattatgagaggagtaggaacccattgagagtttaaagcagagaatgacataaacagataacatttcaaatagcagtgcatacgtacatacatgtgtgtgcatgcacgcgcacacaaacctgatacagtaaatcactggactggtttatctcttgctataaaagtatttgaaattgtgtttaattgaagggtctaggtatttgaggttttactgaatatatagtatttaaagattaatgaaatagtcacacttatttatccaatttcctgctttggtaggaacttcacaatgaacttcacacaatcaaatgaacactgatttctttaaaaatgaacaaatactccacttgtactcatagcttcatgaactgaacctcagcagaaggttgatcggtgctgcttcctggggtgatctctgtgcaggagatagtctttcaattctcttaggctgatgttgtgagattttaatacaaaaaacaaagtttccctcaaagattaaatcttgtatattcttctgtttactccacccatatgtgtctcgagtcacaggcatatagcaaggcactggtgaccgctggttctccgaagtgaatcagctctgtgagactgaggccacaccctgcagttagaaattttacttggcaatgacagctgtaattttgtcatttgtctgtggctggggctggctcctaaaacccggtgtggatagtgacatctagtggatctctagtagatcagttccgtggactgtcaggtaccaagtgaagaaacacattcagcggtgccacattctaaaattcaaaatatattctctgtaatccagttgcctgtatctaaaacatgaaattattaggaatattaaaatttaatttactgttttttccccacagacagaagatccaaccatggagcgaccctatacatttaaggactttctcctcagaccaagaaggtgaggcttgtgggtatgggtgggtggggatgcctgccctgcatgctgtaggtataggtggggatgcctgccctgcgtgctgtggatatgggtgggtggggatgtctgccttgcttgctgtggtgtgggtgggtggggatgcctgccctgcatgctgtggggatgcctgccctgcgtgctgtgggtataggtggggatgcctgccttgcgtgctgtggatatgggtgggtggggatgcctgccttgcatgctgtgggtgtaggtggggatgcctgccttgcgtgctgtggatatgggtgggtggggaggcctgccttgcatgctgtgggtataggtggggatgcctgccttgcgtgctgtggatatgggtgggtggggatgcctgccctgcgtgccgtgggtgtgggtgggtggggatgcctgccctgcatgctgtgggtatgggtgggtggggatgcctgccctgcgtgccgtgggtgtgggtgggtggggatgcctgccctgcgtgctgtgggtataggtggggatgcctgccctgtgtgctgtgggtatgggtgggtggggatgcctgccctgtgtgctgtgggtatgggtgggtggggatgcctgccctgtgtgctgtgggtatgggtgggtggggatgcctgccctgcgtgctgtggtggttggcttttgctgaagacgattttaagtgtcctttgaagtcacaacccttctaaccaattttcttccattatgtgtgcagtcataagtctcgagttaagggatttttgcgattgaaaatggcctatatgccaaaaaatggaggtcaagatgaagaaaacagtgaccagagggatgacatggaggtacgtggagggcgtcaggcctctctccttgccttgagatcatattcatgttttgctttcaaactttataattgaaggaaataaaagtttagaaagcttaaatataaaaaaaagtacatatgtccgcaaattggtcattgatagtctaccagtgcagttatttgttttggttaaagatgaactttttatgttacaacaccaatcctcggagagatttctctttagacaatgccatgcctattccccaattttagccccacagctctgtgaaagtctcctcacacattgaatcctattattgctatggacttgcaactctttgtaaattctttttagccattgaggtcgcttcaaagtgggtggaggaatttagaaaatcacttttttttcaagtttcttactcatttggccacaggtgacagcctgcagtagaaaaaccctcctctagaaatgccattctgcaacgagctgaccagaggaatgtcccttttttccttcctgacagagccgcctgtatttaccttgtcacagactgatgctgtgggtcctatcgtaccttttcagcacacacctcggccagtgctgttttgttaggcaaattctcatattctcaaagtgtccattaaacgagacctctctagggcttattctcacatctgtttgcagctgttgcatatatgtgatatgtgaataatgtgtgtggagaagttacccgaacactcctccgcctgagagatcatatttccaggcattatttcatttacaagccttcatctctctatatacatgaagaggaataatgtgggtgatagaaatttatgaatgttaacatttcataagcatgtcaacagattttcatctcaaatccaaggaattttttacactcttcttgccttccaaccgcagtaaccagtgaattacttaattttccagtgattttagcagaggatgttaggaagggaatacgtaatgcctaaaatacgtgctgtaaaaatggaactcgaattttggtaccatgaaacccgttggtgtggacacagccagtgtagagggcctgagtagaaggcagcagcttccagactcctggctcctgcggttgtttgggatgcaaagaggaggcttctctctcaaagcccacctccctggggagcaacaggactctgggcctctggtcccctgtgccatgagttctgttagaacacaggtgcagcgcagctcatcttccctgctccctttacctcatagaggtgttgaaaagatggcagctgtactgtgacgcacatcattggcagggctttgtacagccttggaggccctccagtcaaaataacaaacatgacgtatggaaagagtatgatgtgacttaagtagtgtcaccgactgtgcagatccaaattgtgttgtcctgcaatgtagtcatcttagagggcagcacaattaattggccattactcagaagatttttgaggcctttctagaattgatatatatatatttttttggccttcatttgggaatttactcaaatgtggccccgaagccatggctagagccagagagccccagagcaaggagaagggcatgcagggcatgctgtgatgacctcttactcacagccgaagaaccaacctcataatcgtccctttaactttattccgcagcatggatgggaagttgttgactcaaatgactcggcttctcagcaccaagaggaacttcctcctcctcctctgcctcccgggtgggaagaaaaagtggacaatttaggccgaacttactatgtcaaccacaacaaccggaccactcagtggcacagaccaagcctgatgtgagtaccgtgtgatggtcaggaacacgtgcacgtgcactgcacagctagggacaaatatggcggccctttgggacaaggctgggaaataaatcatatgtctataagagcagatggtggtgtggtacgagattcctctccatttacgtaaagcatgcaagagcagtcagaacttgtatattgtaagcgattgcctttgagtcacatgctgctgttttcaatatgagctgatttattttctatgtcttcttttatgtcgattcctgaaatacaaagcagaggttgtttttcttagacttattttacatttgttgattatattgttttcttcttcacctttctctcccaactgacccagaacagaaccggcaagcaaattggctttgcaattttctgttttctctaagtttttggatgtttactctcttcaatgcattgatttggaaacctcaaaaatttttttttctttaaggaaatttgagccccttaatataatcagaaacacatgggagagttgcaaaatcagaattagtaattactgtgtattttaatccctcaccagcctcagggatgcagtaaaccaattcctgttttgttccctcagcaatttgtggtttgattgatagcaaataaacactggttaaaactcatggactttaaaaatggttttgtagcagcttgtttttaaatcattttatacagcaagatctaagtctattgataatacatcgaagggcaaaaagaaagtcttaaggaaaaggaattttatcctagaaattatgagctgcctagcagccaagacaaggaggaaattatcaatgaactatacaactttcagtatgtaataaaagcaagtctactgggtagtataattttcttgtctactcgaactctgaaagaaagtggctaatgatacattttagacaacaagcagtatgaggtatcatgttcttaaaaaccttttatctttagaaattgtaaagatactccacatatgactgtgggtggggagggtggccaagttttctggtctaggttttgtttaatttagagataaagcttgcagaatctggaacaacgaatagcctgtcttctctgagcccccaggtgggttctcgtgaatgtcagctgttcgtgatcagctttagactacccagcacgggcattagctcaggacagcaaaatggtctcaggacagcaaaaatatcagatcagctgggtaatgctgaactatcttttgttaaagttttttcccatggaaatagcttggttgattctttttgttttttatattattgcttactatttccttttgattaatgcccatagctattagaattattgtaatccattgtagctatttgtagtaaaaatgaatttggacccaccttgggcttggttacatgtagtgactagaagaatcttggtagcaatatcctaagcaaagcaccattacctacctttgctcaacagcatgagaaaggagtactgaaaaggtagatcctcatgcgacctctgcagaaaagtggccaggagcaactcacaaaggaaaaaatcctgatagctaatatgtatatggaaaaatattcaacttcataaataaggatcatgcagattagagtttgtattttggggacaaatagggataattgctactttctctgcctcacagagttgtgaaactaacgagggaattcttgagaaaacacttcatacattttaaaatatatactatttttttgatggctccacaggtgtagacatgtccccacactcatcaagaggtgtacgttaaacatgaacagctttttaatgtgttgattagacctcaataaagtgatttaaaagagaaaccatctttggtggcagtgtcccagaaactaaaacaaaaggtataacttgctggctcttcactagtctagagcaacaagggaaaaatgcagttctttttctgttgttgtttgagacagagtctcactctgtcacccacagtggcaccatctcggctcactgcaacctccgcctcccaggttcaagcgattctcctgccttggcctcctgagtagctgggattacaggcgcccgccgccatgcccagctaatgtttgtatttttgtgaagatggggtttcactggcttggtcaagctggtttcaaactcctgacctcaggtgatccgcccacctcagcctcccaaagtgctaggattacaggtatgacccaccacgcccggctgaaaaatgcagttcttaatccaagttcgggctcacatgtagttttgggagaaggcagaggcataactgccccatcaaggaggcagcaatgccaaagggagaggctgagccaggaaggacacagcagaacttggcagaacctgaggagcgcctccttccaatgggcataacttctagaaggcaagaggaaagttagttaaggaaaaagagtttccaccacaacctctgctagcaggccctttattgggatacagtataagttcatttcagaatgtgtgagaaaactttaaaatttgtgttttagaaagagtctataatgagtgttcttgataagtactatatttcagttagtctgaaatgacgatttcaacttttgagatactgacttgtgacataatttttgttaatgggatatgttatcttattgaaagtatctgtgagagttttccctgaaaaaatttttggcatttaaacttgtacactaaaagcctctgactagtatttcccccaaagtatgattgcctataatttactgcaaaaaaaaaagttttcttttttctttttttttttgttttgttttgttttgagatggagtctcactctgctgccctggctagagtacagtgacatgatctctcagctcactgcaacctctgcctcctgggctcaagtgattctcctgcctcagcctcctgagtagctgggactacaggcacgcatcaccacactcggctaatttttgtgtttttagtagaggcggggttttgccatgttggccaggtacgtcttgagctcctgacctcaagtgatccgcccgccttggcctcccaaagtgctgggattacaggcatgagccaccatgcccagcccaaaaaagtcttccaaattgaatcaaaacttttagatcctgaattgagaacatcacatgacaaaaaatagggtatgatgttttggtgttcttcagaccccggctgacttgagaggttatctcctgatgttattaggatttttaaagtagggtaaaggaggtaaatgcagtgtcacgattttgagattctgttaaaatgagctagaaagcagctgaaaaaaattcatgttggatcaggtgtactttcctccagatgacagctttgaatttgtcccttttgtagtctttggtcaaattgctggtgaccagaagtagctgccttgtcattgctggacttctagaaggattgggactgcccagctgctgtgtgaacttgcctgtcacctctgcttccagaggtctgacttgtcactgtggcaaatgggcagaggactttgatttctgttttttattaaacactgaggtatattttgaaatgtatgcctgaaagatgctcaaaatggtgtgactaatgcattttaaaactgcatttatttgattgaaatgaaccttaacctatactttagccgtaatatggtgggagaattctcacattggatgaccagctagttgtcagtgtttgacgctgacactttagtggccatctggccctccgtgagcattgaactgtcatgaagggcccgatctcaaccacttctcttcttctctttccccctttcctgcatgctcagggacgtgtcctcggagtcggacaataacatcagacagatcaaccaggaggcagcacaccggcgcttccgctcccgcaggcacatcagcgaagacttggagcccgagccctcggagggcggggatgtccccgaggtacgatgtccccagaatggtgcaaagcccggcagctccttcttcccatgttctccagcttgattttatatcataatttcttctgtcagtaaacattgttgagaatgtaaagattacagtgacgcagggaattaattaccatctgaatattaatttgaaagtgcctataaaagccgtatttgacaagtataggtggctctatattatagaaangggaataacattatttttatttttattttttttgaagacagtgtcttgctctgtcgcccaggctagagtgcagtggtgcagtcttggctcactgcaacctccgcctcctgggttcgagcaattctcctgcctcagcctcctgagtagctgggattacaggcacgcatcaccacacccggccagtttttgtatttttagtagaaatggggtttcaccatgttggctaggatggtctcaatctcctgacctcgagatccgcctgctgcctcagcctcctaaagtgctggggttataggtgcatgccatcacaatggctaattttttttttttttttttttcctagtagagacgggtttcaccatgttggccaggctggtcttgaactcttgacctcatgatccacctgccttggcctcccaaagtgcttagattacaggcgtgagccactgtgtccagcccacattatttttcagtatgaaaatcttaagatatttttagtttgtaatttatttttcacaggggtctaaccatgtctcattaaatgacagcttgtttttatcatagttgagctgttgaatgagccctgtaacttgtttgggtatcatatgcatatttttattgagtcgctttgacacttggaagagatttattaccatgaaaatataaatttaggtgaacagaaatgtgtaattttccctttaaatagttatggtatgttacttaaaacgttatgaattaaacaacaaattagccataatcttccatgctatcttaccagctctgtttatgtactaaaaatccattcttcttagacattgtgttaggaagatcatttagaatgcggcgattcaacttggaaaagcaaaagtaatgattccataacacattcactctaagttattttataccattgtttaattacagcgtatagcttctatgctgctcccacggtgaatcctcagtggttaaaagtaaaagaaaatccatgacaattgtttataaactccagagaagtgtgtgtgtgtgtttgtttttttgcccacacatatagtaacaagtgctggaaatcagtcactgttcagagaggcattgttataaagtggttaagagcacagcctctgtctggaaccaggcctctttgattcacatcatggccctaccacttgctagatgttaccttgggcaggttattttctgtgcctcagtttcctcatctgttaattgggggagttatcttcctcgtgattattgtgaaggttgtgtgcctcatgagaggcacttagtaggtgttaattatagttatcaccggggctattgttgttacatggtttcattggggagctgggtggatccctacttctttctagtgtttaccccagtgtctccttctctgaaagccttgggagaccatttcagaggaagtgaatatcgctggagactctctcggtctggctctgcccccaccaccggcctccccaggatctcggaccagccctcaggagctgtcagaggaactaagcagaaggcttcagatcactccagactccaatggggaacagttcagctctttgattgtaagtagtggccttgtttgaaagaaaagctgagcaatgttttattgttttttgttgcttaaggagaatctcttacgtaaatagtgaccaagggtcttccagctcccagctaactctgacattttccaaagttcctccttccctaggagaagcaggactgtactaaaattagcccaagcaggtgagaatctttcttgatttggaaggcagctttgctcacccttataccactaacactttcttggtttataaagaactcaaagaagtaaaactccatgatgtctgtaattattagctttaaccttgtagaattcctttcccagccaaaaggctcatgaaaatagtacctttatcacaaaggtagtatttcacagtaacaattaaaagccatcaggcctaatcagtcctcttaagtcatattctgcaggatttatcattctcatttcgctgataagggcacaatgcttaagtggctcatccaagacaaggtttgagtgggagatagaagacgtctcctaagtcccagagtatgaacccttgagaaatgttgtgaaattgtgacactgtcatcaaggtagcattttaacttgggctctcaaccatcagaaacatactttctagaagcttcagatgggcccaatgcctgagcccaatggaatcagtcacaaagacttccatgtttgacaatacaaaactgtgcagaaataacccatagaaaatccctgcttgtgcatagaattaagagcaaatgaagtctcagtgtttctcaagaaactgaacttaaaaatgtacaatagtaaatgatgatagtcactccactgaaaatggcatcctaaaaaaaaatagtcattactatgaccataacaaacataaatgatagcactgcatacaatgtaaaagcaagtaagtactcacaaaattgttactttttggttatggtgtttttattttaaaagacagtatacgcctctattacatgagttgcatttatcattcagttaatgtgatttcactttgaaattctgtgactttttcaaaaagagatgtgtcgccaagatgaaaatgtagtactaaatggacaggataaaagaaattgcatatatatgggatatttgaactgataaaactgttgttatagaaacaacataaacaatgaagccttgtatttaaaacctataaaagcaaggaggtaccacagaatccatggcagtaacacacctttagtaaaccaagtaaacactgtaatttttttcagcaataatcataagttagcaattctaattatttaaatgaggagctcctgaatttaattattctagatctgtgaaatatcattaagacccaaatacaatgttgtattatttcacatcgtgttcactgttaaatgagagtcaaatcggatatttgctcattgggattaccctgtattcaaggggaagaacatgagctttggctgggcacggtggctaatgcttataatcccagcactttgagaggctgaagcaggcggatcacctgaggtcaggagttcaagaccagcctggccaacatggtgaaaccccgtctctactaaaaatgcaaaacttagccgggtgtggtggggtgcacctgtagttccagttactcaggaggccaaggcccaaaaatttcttgaacccaggaggcagaggttgcagtgagccacgattgcgccactgcactccagcctgagcaacagagtgacacttttattaaagactgattctttcacagtaaccaatgtgggaagatgtgaattgtcccccatccctaccacagagtcttcttgtaccatttacttatcacaaaatattaaaaatgagtaaatactagaaactgatactatggatgaacttgccgataaggagactctggcttctgtgtgtgacctgctgctaatcttcattcatatcaattaggcttcatttaaccacatagactaatacaaacaagttagaggaatattaagacactacacagtagatctttttttttagcttgatctcactatttttaatcattcctgtctttactacttgaagtccacttagaagctaaaattggctgagcatggaggctcacacctgtaatcccagtactttgggaggccgaggtgggtgaatcatctgaggtcaggaggtcgagaccagcctgaccaatatggtgaaaccccatctctactaaaaatacaaaaaattagccaagtgtggtggggggggcttgtagtcccagctactcaggaggctgagacaggagaatcactggaacctgggaggcagaggttgcagtgaactgagatcatgccactgcactccagcctgagcaatagaacaagactctatatttaaaaaaaaaaaaaaaaagcagctaaaattataaataccagatctttcagaagtaggccaagatgatgtctgagctcctctgaatataggatgcaactgactctttttcaattgtagtaatcaataaatgttgggtagccacatatcactatttcttccgtctattcacatcacattaaaatttaccctgagggtgcatcttagagcaaactacaagactgctagcttctttctgtttgtaaagcagcattagagtgttgcagagtcctgttgagtctcctttctgaaagttttggtctcctcttacttttgccactaattctaaggaccaatcaaaattccagtctgcttaactgaaaattaaagtgaaagataactttttcaaggatgactgtccttgctctgaaaagatgtttcatttaattaccttctaatatcgaagagcggtgaatatggttgagtgatatgtttgttaaaccaatgaaagttgcttttaagaatatatttcttgatgcttcctgtcttttcctctccttccagcaaagagaaccctcctcaaggttgaggtcatgcagtgtcaccgacgcagttgcagaacagggccatctaccaccggtaacccatgctaatttccagtcatcagttgactttttgggctttcatttacaatcatctgggctgctgcaaaaagagtttttcctgtgtaaatttatttacaatataaatgagatgtttttaaatttcctggccaattgccctaggaaagtggatttccaatacagagaattgttactgccacccatctctaaaatgctggaacctccattgctttagtttttcacccaaatttataccaattttgatttgctcacttaaacctcttggtacattagttagtaattccttttaccttattgagttactatagttatgctccagtgatctgtactttgaaaacacattgagtccctttaaccaggaagaactcttctgggcgaccgtccacatgttcctttcccttcctaatgacctgaagtctgaactctacagagcctctgtaccttctctttaaaggcagctctgctcaccaggaattggctataattctttccaactctctcatcattttaatagctatcagcaaatgtagaggtgtaggggattttgtaacatctgatgtatgtaaaaagaaatattcaagttggaaggcagactagaactgccctgagagatgtttgatgtacacattaaaaataagaaattttacataaatttgtttcttcttttggaggtgaaaatatgtggttttaatgtgttcaatttgatattttaccttgacagtttttgtctgttgctacaaaaccttgatcatttttaagactaataatgtattacgtatgaatttgaagggggaaaagtgcatttaaggtttttgaaatcacagtgtcttccctctcatgtatgttttttcttgacttcaaaggatattttggcctaggttttaattttttatgtttgagaaaaaattaatgagtatactagtcaaggaagcagtcaaaataatagagtcatttgtgacttacactggagagacttaataataagcttgataagagcgtcttttctgggatggtttcagtacagggctcccaaaaacaaaataatcaactgagatggactggtaggatccttctcaacctcatgatctgtgattttccttgaacgaatggcactttctctccttttcaaaatcaatgtcaattttatttcccaaagaactcactttcctggaaactggtgattcctccctctttctttgtactttctgatgctgtaaactcactgatcaccagtggcctcttgagttttgagtgtggggagatttcagaatctgctaattatttgacaatggcaggcaaaaccagaccagctttccatttttctctaaggcagctcactcttttgaggttgtcattgtttacccaggtcaaggatgagccaccttggggggcataggggtcacgcttcctttgtgctactggtcatcagcgactgctggctttgtctggatagggtgggtttcagggattctgatctcacgtcacctgccttacagcgctgccacagcagtgggccctgattcagacagcagggggtcatcccctaagtgcatttcactgatgtaaattatcattcacagcccagtgccccagctgggagagcgcgttcatcaactgtcacgggtggtgaggaaccaacggtaatgatccactttatcagacatcaatagcaagaggccgtgaggcagttttaatatttcgtgtagtggtgaatatacgctgtttttaaaaataagattagctcctttgtgctacagagctgcacacgtttcttattttaagcttctcatttggggattgtttaaaggtactgggtaaaatagaatgatttttttagtcccacataattttattaggaatactatcaggctttggttaagtgcatttaacttgaccatttagaagatatttttgacttttagtgtttgtactcctgataagtttttccatttcattagaatgcttggttaaagtaatttggttggaagatcatcaaagaagccacaggaattgcatgagactgtgtgtgtgattcctggatgtgcccagggcccttctcttttctgtatctcccctaccacatttttcacagggggttagacttttcttgtccccagaatgcaccatgaccctttctctgccaccaggggctctcctcacacaatgaacaagtttccgtaattccaagggaacataattaggatatataagtgatctagaaaaatttatgtttctctaagccaaccattcttattcattattttaaagaatgtatggtattcctgtctgtgggtgacttagatttgtattttaattgcctgttttctacttgatccctaaagttaggctagcttatagtttatgcttcgcactgcaatagctgtttaaagaatttcctggccgggcacggtggctcacgcctgtaatcccagcaccttgggaggctgaggcaggtggatcatgaggtcaggagatcgagaccatcctggctaacacagtgaaaccccgtctctactaaaagtacaaaaaattagccgggcgtggtggtgagcacctgtagtcccagctactcgggaggctgaggcaggagaatggcgtgaacccgggaggcagaggttgtggtgagctgagatcgcaccactgctctccaccctgggcgacagagcgagactccatctcaaaaaaaaaaaaagaatttccttattgtttcacctgtgttgtattttgctataactgctcattacttgtggataactttacgtatacaattgctgattttctaaagatgttgatgacttcaatttaatgctcagcattgtacagaggaaaatcaaactggcaacagtcagccccagaacactcagctcaggttaagatattgagctacagtggtttacatgagtcatgtgttgagtgaggcagcctccagtagaattcaagaaattctacatgaactattacccaccgtgcacttgtaatttctgtgggagtagtggagctttgagggggacaagatcgttttgtgagataattttagttgaattcagtgctgatgaacatcatctgtatatcacctatttttgtattttgttggccttgcaacctgcgtgtagctttggagtgttgtggtagctgatgtagtaaatgaagtaggaatggaatcattgcagtaccaggctccatggcaagggtcacctggcaggacaaggtgacccctctgaatgagatcccgggtggcacgttagactgccattttcttgccttcttgcctgcactctcccctccccgtcactgagtttcagcatgggttgggtgttttctttccacaggcttggcaatattcattcctaagtgtttcatctactttggtagatgtagatagatctccctacctacttaggtttgaaaggatcacatccatttctcttctgctgtatcctgcatgtttctcttccacatcctttgtcgtgaatgcccttgacttcctgtcttgcaattctgtctcttcaccccgtgtttccctctttggcatcccctctgttcctctgcacatcactcacactgaagtgtattgtcctgggctggagccatcatggtattatatcatctcactgcccctgtgctctcacagacatacggctgtgtacacataggtacacattgtgccactttattttattttttttaaatgggatgtcatgtatacattacttagcaacttggtttttttttaacttatgttcattcttctgggacatgttaataattacataatattcactgacgtaaaggcactacagtgttaatttcccgacattcaaggactttctgctccccctaccctgccctttcaactccatacgctgtgctgaagtaaccgtcctgatatagctttctttctatgatagtgctttcattcctgtagtctaataaacaggccctgattctcagccaagaaaccacagccctttgatttatggcaaataaacgcacagtggtgtcactttctggcagactaagccagggccctccccatgagataaaaggagagggatagcacagtcctttcagtctttgttgtatatattctaaaaatacacgagccaccattactgggttggtgcaagtcttggcaaatctgtgatggtcagtgtcaaagtggttatttttaaaagcatattgaaacttctgcagtttacaatcgtgttctttattttaatgaaagaaacagagccactaggaagttctagctaatggcttttgggcatcacaaagcagtagtgtattcagtctatgatgaaaagctgtgaaatgttaaactaagtcgccatttctaactggtttgattacttttttgttaagctagggtggaacatgctcacaagcacagaacagcagaaggctggttttggcttcctggcgggcccttccatggcctgtctgtagaagctgagtcctgccccctcaactagccgtgcagggtgggaggcagtgtgagttacaaatggaatcatcagcacaagttgttctatgtggtcatttggagagaacactgtaaagaaacatttccaaattgccctctcacataaatgtaactaaattacaggttgccagttcagttctcaatagaagagagaatgagcattttaatcaaattcagcgttctgtactacactcctaattttccacaaactgattagtgctattcactgtggctgtatgaaagtaacctgtatggccaggtgcagtggctcacactggtaatcccagcactttgggaggctgaagcgggtggatcaattgaagtcagcagttcgagaccagcctgaccaacgtggtgaaaccctgcctctactaaaaatacaaaaattagctgggcatggtggcgcttgcgtataatcccagctactcaggaggctaaggcaggagaatcacttgaacatgggaggcggaggttgcagtgagccaagattgtgccactgtactccagcctgggcgacagagcaatactctgtctcaaaaaggaaaaaacaaagtaacctggttgctagaattcatacagctttaggattcagttctgacatgatctatgacacatccatgtgctttcagttgatcagttgcctcccaagtgtcctttccagagattgagtaactgcaaaaatatccttaaggtttccagagctaaggtttccggagctgagttttccaggggcggggccagggggagtggggagttatgggagggaaggggcctgggagagggggaagtggatcaccagaacggctgaaggggagggctctgggcggagggagctgagaatgtaacacattccatttagtatttcattgattgtataaacaatagtaggtcaaaacttgatagcacatactttgccagagatactaattgaccaggaacttaggttacaacttagctcagcaggggagtccattgaagtgcccggatccacgtagctctttgtgttggcatcgctgctagaggaggaggggaggaaggagcttcactcaggctgcatgctaattcatcgatgtttaatattcatgaaaggattaagtcagtgttgatgtttcttctgctcctgctgagtctccacacctggatccagaatgctccatgatccgagtctttgtgtctttataaactatctttagggagctttaggactttatctcgggaaatattaaggaaatggttttccttaatatcagcagaaagttttcttacacataatctaaaatcagctgcttcatgatcttacccaggtgatctttctctgaattgtgcttttaagcctgggaggttaacatactgcttctctgtggatggggttttcaaattacccggcagcatccttgttggtgctttctctaatttgagatcctggagtccaccagggaactccaggtgaccaccttcaccaagacacattgctggtagtgcagggaaaaggtggcataagcacaggaagaagttaggttcagaggaaatttgtatcctcagcctaatagcaagaaaacgacaactgctaaaatatctggaagtaaaagaagcagcttccttttgtaacctcacgtgagaggttattcctaaggcatgggctcctcctatacctttagattcccctaggagccgtggtatagctgtggtcggcttctggtttctgagcttttccccacttagagctctttcacaggcacagatattacatgcatcgcctatgcattcaagccctcctgggacagccctgatctccagcatctgtcccagtgcctccatacatcatcaacacatccttgtttttcagtgtttctccatccacactgcatttcttagactgcttctcagggatcttcttgtgatcaaatgtggactgtctaaatacagtcactctatgcggggcaggtctctaaacccaaaaactgccaagctgtgttcaccttcaaagaaacacactcctatcagcagacttgggtgcacatagcctggggtgtgaggctgggtgctgggagacttcctgagctggggcacacagatgtcctgggtggtcctccagattatatgctactgtgtgaccatcagtatcctagagaaggggctctgtgttgggattttaaaattttgccccagaagctacagtgttagggtcctaagctgatggaggaatgtaggcctaagctagaagagcaccccatgggagctacatcgaggagaaactcagagcatccctctcatacacagtgacactggacagtttgaaatacctttaagctctacctggtttggcagtggaatttagtagctagaacagatgataatgtttttccctttccctgtgatcaccttggcagcaaccctttacgtttgagactacggggtcttagaaccaagttctgtaagaatttggactctgcaactgtatggggttcatttcacagtagatttgaagctgttggaaatctattgctgttttccagacacttgtaagtgttttctntataaatagatctaattaactttgtctagagaaaataattatctgggtgtaccttactttattaaactgatcagaaaacaaatgcaaggtattaaataataatgatttcttgcacaaacagccatcagtggcctatgtacataccacgccgggtctgccttcaggctgggaagaaagaaaagatgctaaggggcgcacatactatgtcaatcataacaatcgaaccacaacttggactcgacctatcatgcaggtacgaagattgccatccaacttaaaaccgcaggccatagaagccgaaatgtacatgaccgaactcctttcctggtgtttatgtattgttctgaaagacccgtatttgtaaaagctttctcacaaagaaaatgcattactttaaatacaataatagcctaaggaagaatttgcttttcaaatcagtttatcactgaatatattttaaaaatgtgacgtgaaagatattttcaaagtaagagcctattgcagtgtgtagcttcttccctgcccagcccccactttaatccgaggctagtttttatgctgggctagtgattcatttttatttcccttgaatgtgtttccccatcctttcccccatcattatgtttaattatttcctccacgctttaaataggccagacctcttantattgctgtttgcgttgttgtttgggttcgcgctcctaatcacacacaccgggagatcctcctatgaagctaacttgtttttgcctccaaaatagcttgcagaagatggtgcgtccggatcagccacaaacagtaacaaccatctaatcgagcctcagatccgccggcctcgtagcctcagctcgccaacagtaactttatctgccccgctggaggtgagacggctacctcatctaactggactcactctgtcctgtgactcccattctttcttctctcttaactctgccttcagtttcgcagccacctcctctctctgatcagtcgttgtgttggtagtgaagggtgttcttgtgcagcctttctacctgcttctctgtctcgcccagttaacattcctggactctctcacctgattctcattctcatttggctaaggccgtggtgacttgtgctggacgtgggcactctcttttcaggacttccaccgttcttgttgtgtttcgcttctttttgcctgttacctcattagaattgcgtaatccctctttcaaataccaagtgctgatattgagtttttaaacatagctattgctttgatcatttgtttttctttcgactgtagggtctttcattctatgggcatacatgtttctgatgcatatttgcatctctgcatcatggctgggcatctgcttgtgctctctgtcgtgtttgtgttgttttggtgccatcctttaacatcacaaatgtcagagttagagaagccaaagagcaaatgtttgaggtcctaagcttgactgtgtcttagagacagctgtgggcttctccacgccctgggtccagatgctgataagtgggaatggatgctgtctcttccacactctgatatgaatgtcatgggtaacaactgtgagattccagatcgttgtatttattgatgtagcttttttcctttttgtgctctaaaacttgccaatctgttcttcattagactgtgagctcattaagagcaagggcacatttttctccactctgtaaaatctccatccataatgcttagtacagaacagtatttttggtacatactgagtagctaccaaaggatggtggttataagtacttaatattgttgtgtgtttatccaacagagaaaatgtaaagttagattgatttaaaagtaaatgaatgacagaaaacaggttttggggatcttccctcttgtccatctccaaagagaagccttctgcaatacccaggtacattttggcacattggaatcgcacatgctaaagagttctaatcctcattgttattctttagggtgccaaggactcacccgtacgtcgggctgtgaaagacaccctttccaacccacagtccccacagccatcaccttacaactcccccaaaccacaacacaaagtcacacagagcttcttgccacccggctgggaaatgaggatagcgccaaacggccggcccttcttcattgatcataacacaaagactacaacctgggtaaggctgctgcttttatttggctccattttcatcatgaagtctggcattaattccttgatttccttagtgtttgtagttcttgcagaggaattggattgactgtaaagggtgtctccagagggtctcctcagcctgcatctggcccctgcataaatgggcgggtgggagtgggtgggcacaggctggtagctgtctttggtattggtgctgggactgccttttctcctgggaagctctagtttagacagttcaccgtgctggatggaaaggtattgctctgtgctgttaagattttgttaattgatcccgtctcacaaagtaatctcactaggagttataatcattttcaaataattttttcttttgtcagtttcttcttgcactttcattggcattacccaccttcttttgatttgtcgctttagtttttaccgttcacatcagatcagtattcacacatctgaggtacattttcatgcccttgatcatggggtaggggatgtactgagtgactttggttgtagatctgatagctcctttttgtgatcattttgtcaaaattgatttttcttaccatgcaactctttcatgtactcctgaattgtacccaagaaagaatctgtacattgtattatcttgagcaaaatgagattaatcaaaggcaaatatgcatatctttgtatttctgtgtcagttctttatttctttagccgaatcggtggctttttcagtgtagtatatgattcttttaaaagtcagttggtattttcctgctatataatctctatacctgtaattacactgaaaccggttcccgtatttctggctatttttgatgctgcagatggtttttcttccggttatgtccccatcgaattgtctagctagagttaactcagagtttaacttggtcctactattatctgtgctacttgctcaaaactgatgttatgggaatgctggttgagttttggtgattgttattggccctagctcttcggtcttggaccaacaataaacatacaccattaattcccatttctagtgatggacattaagtgtgtccatttgatagaccagcagccttatattcaagaacaagccctgctcaaggggatttgggctgtcattttatgccttgcccattgtgtggtatcagttcagtccagcaggtctagagggcgtgctcctagaatcctttgaaccgtgggacattgtgtcttcaagggcattcttggcatttggggcagggacatttgtgccttcagttgcagactatttaacaaacttggcttctgctaccaggtgctaatggtcaccattacccccaccccaacatagtgatgaccagaaatgccctacacatttcaaaacagccctaagtgagaaccactctaagagctctttctattttgaagtaagggaatggcctgccaagagaatttctcatttagatctggtaacattcatttggtaaactgataactgcttctaaggcatataataacatgtaggtttgactcccctactagtctgaagataatgttacagatttgcaagcaagccaagagtaagagacgggcagctcgttggaaaatatagtaatggagttctttttttttatgtctttttacttattaccatggaacccctggctgtcctgccagtgttctcatttactatagcactgctgtaatttcaagtccttagccagaaacaggctccagaaataagggctaacgaatataaaagtagatggattagtgtaaggagccactgtggcttgccaacataagctatgattttagtaattttaactagcttggtaatcaaatcccctaaccttttcacagcctttcaagccacaacaacagtgtaattgcagctgggcagattgtattttaaattaaacagcactcgctttatttattgcttgcaacattgctgaatgaaacccatttttactttccagttgcgcctgtttacccagatacttgttattgactaatttactgatttaaaatcataatctgttagaacaacgttttgttgctgctgctagtgtgggaaatcctcaaggtaacaactggaaattccacaagctactccccttcttaagcgaattcagatgtgctgacacagctgcgctatcgcttctaaacaaaggcctaggcaggattttccctgcggaagacacactctaaattgcctgttcattttgacaaaagatgaagagccggagggaagcatgaagataatttgcaacttaaaaatctgttttgagttggttttagggtttgctttgttttttatttttgaaagaagaagagaacaaatgagagaacagcatagctattcttagatttgagcattagaatagaaaaaggaaaaaaactggtaggacaggttgaaaatgatgaaaataacactccttcccccatcggcctgggcactgttgattcttacaccaaccagaagcctgaaaagtatcaggacatttcccctctatacattgagaaattaaaaaatttattgaaatatgtcatgaaagatgaccttttacacacacacagatactgaaggcagtatgccatcagtatttggataaagtttggcctcattctcttttttttaattattattttttttgtttttgagacggagtctcactcttgcccaggctggagtgtaatggcacaatctcagctcagtgcaacctctgtctcccgggttcatgcgattctcttgcctcagcctcctgagtagctgggattacaggcacatgccaccacaccagctaatttttgttgttttttgttttttgttttttttagcacagacagggtttcaccatgttggctaggctggtctcgaactcctgacctcaagtgatcctgccgcttcggcctcccaaagtgctgggattatgggcatgagacaccctgccaggccaagtttagcttcattcaaagaaagaaagaaagattggctttgttccccgcctgggtcaggcctttcagggaatgcatgctggagaccaggggcttgggagggatgtaccaaggagggatgttccatcctcagcagctcagagcacgtgtatacgggttgagtatccctagtttaaagattcaaaatccaaaatgatccaaagtctgaaaccttgtaagcactgacatgacactcaagcaataaatgcttattggagcatttcagattctcagattagggatgctgaagtggtaagtataactgcaaatattttgaaattcaaagcccctctggtccccaagcattatgggtgagggatgttcaacgcatattagtatatttgtgcctttcacaggatgaagcatgggcttgcttttgtagcaagaaagattacaccctagttaagttgcaggtttgttttccatccaagttcaaactaatgaaacttattactctaggtgtggttgctggtctcttccaggatggaaaagataaagaaaaaaggcacttttttttaatccctgtgttttatatattttgaattaggaaagccctttttaaaaagatactgctctttgcatcctgtttaaaaacactttgaacttgatggagggaagcaattttatattacacatgaaagagttcccgttatgaaactgaagaaaggaagaaacaaccaggcacactttatgcgttggatcatttattttcattgcatcagagccctcgttagtattccactttctcatcagctctgaagttgtccataactaatagagagccttgaccgccacttcatgtgccctggcaactaaggagagatgcctgcctccttgagtggctcggtgggagtcagggcttgagggtgaccactagccttagccctcagagctgattcatggcagctgctgccattatttttattatttttgataaaataatattataagcctcaaggcctctggccctcacagtctatgaagtctaggtttccatgcaaggccactttagcagatctttgaaattcggttgactttatacttcatgctctgcccctcactgcctccctgacacttttctctaatttcagcttcttttcacgctacggccccccccgccccccccccccctttaaatcaccagccttttaccaatagggctgattgtctttcacggtagcctacatgtgattccaaggtcaggctggccttgtgtgtagcattcagaagccctgccctctttcatgtaatagcagtcctcagctttctctaaatctggcatggtcataggctaggtggaagcccaagggtcccccgctggttgtggcgttacctggtccggatcagagttagcattgagtgggtagcttttgagaaattcagtgctttcagtttttcctctgtctgtagttaaccagtcatgaatgtttaccagattatcagcttcttggaccttctcaatcctaaatcagcttagcatatttctttatgttctgtgtatgtcagtgtactgcagaatactggattattttgtgcctctgcttagccttttaaaaaaatatattgggttcagggtcaatatgcatcacaaactgctaacaggatttctttcttcatttaaaagttcacctagctagcaagaagcaagggttgatttttgttgttcgtggtcttttttgattcttgccagttcccaagatctatgattatgattcagtgatactatgacttacacggttgacttgggaagcagaaaaatctagtaatttggcagcagcaaaggccctattataaaattgaatgaagctgatatcaaatgtcttcacagtttactttttttaatcttaagcttatttggttgatagtggttttttttttgagtataaagatatggattctcctttttatgtttttggaggcaagactcactgcatcacccaggctggagtacaatggcacaatcacagtttacggctcactgcagccttgacctcctaggctcaggtgatcctcccacctcagcctttcaggtagctaaggcaggcatgcaccaccacactcagctaactttttgtgttttttgcagagatatggttttgctttgttgcccaggatggtctcgaactcctgggctcaagcagtcctcccgccttggcctcccaaagtgctgagattacaagtgtgagccactgcatctggccttacactgcatttctttttcttttttttctttttttttttttttttttttttgagacggagtctcactctgttgcccagcctggagttcagtggcacaatctcggctcactgcaacctctactttccgggttcaagcaattctcctaactcagcctcccgagtagctgggactacaggcacacaccacacccgggaaatttttgtatttttagtaggaacggagtttcaccatgttggccaggctggtctcaaactcctgacctcctcagcctcccaaagtgctgggattacaggcatgagccatcgtgcccggcctacactgcattttaactgggtctacataagtgagagtcagctcctggactctgggtcataatctttgggcaacttcctgttctctctgaaactccatttcctcatctaaagaaacagaccatgtgcccaacctcctaccaagggtctgttgcaggattttacatctgaccatgcctcataaatcatgcagcctgacccaggttgtcagagtacatatttctcttttgttgattctctgtggtatcttatgaagcttatgctttaagaaaaaaattttgtaaacgtttaaatattaagacataaatgagaacttaatctgcagaacttggtcaagaatctcagtaaagttgtatcataactttgtgagtttgcctgatgaaagcgactctccctggagtagccacgtgacttcacagaccagattgacattctctgctgagttcagaaggagtggaggggagcacaagtgctggaggagggtgtggcagggaggcctattccctaacgtgttaggctggctcccctcaccgggagctcgggacccatggagagatttcgaaaccgttgtccccactccctctttgtgccacattcactggcaccctccattctggtttccctagtaacatcactgctgggactctcttccccttccccttctcaaggtctcagggaaatggttaacctttcatgtaaatattcttactctcctctctccaccaagcacaagaaggaagagtacagtctgtctcgagagacagtcagccaggcttcctgtacaaaacagagatgggacccatctcacgctccaggcatggacagcctggttgccttgaaacaaacagctcaagaagaaaagcacccagtaactgcacacagatacttccacttagcatctactgtcttttacatttttcttgcaggaagatccacgtttgaaatttccagtacatatgcggtcaaagacatctttaaaccccaatgaccttggcccccttcctgtgagtacactggagacacatggaatggtctgaatatgtgtgttcctttntccgctcaatgttgatggagaggccctgtggaccttctctatctccaggctttgtggatctcattggtttgtgtttcttaacagaattgggtgtttagctgaattgtagtcatacattatagttcatgtgatatccagtacttatgaaagaggtttctgaattgctagcttctagcagaagatagaccttgtacacaggatgttcaagagacgttctctgcaggtgacaatttaagtggcactcattcattttgtaacttagcaaccactgagtttcagtcatattgctgattaagtcatcagaacaaaaataatgaaaatagtatgggagaagaaggcctaattaatcatagaaagtttctataagtcatttaacctgcagatttttaaagtttttttctcccttgttggtgacggctcagtaggagttgagctatatacttaaaattggattttgaatgaaaccttcacatacatcctcctcaacaactcactctcagtttgaaaaagccgtagggggtgacagggcagtggttggactccaaggctatttttaaatgggaatttttgttgttgttttccaagtgtaagaacctttttgttgcctggtatattagggcaacattggaggctgcgaaggttaaggttcaatcattattcattaggttatacaggtatcccacaccaaatctgtttggttcctgggttcaaatagaaagaaccagagagttagtttagaaaacaaaagaaagcatttttttctgaatctgttggattcctgaggttcagatagcaaatatggatagttcagataatgagggcataccagctttatcttgaaaaaattctccaaatctgtttagttcctgagcttgactagcaaaagttcatggtggataataccaatattagatcatcaactgcctggacaacacaaatacagttaaccatgtctaacatttttatattaaccccctcttcctttcctttagtactcagtatttatttaattaaatggtactcaacttcaaactccactgttccatggaatgctgcggtttccctttgaagcttttgagctagcagcccatttccggttcttcatacagtcagcgcatctgagacctgagcatgtgataaagcgtgttgctagacatggtcaagagttaacttgaaatgttcatatttagttcacgctcaatgcataaatgtaccctagcagaaaagagtacagaggtgttctatagtttttaaatgttgcctttgatttcagaactcctagctaatgtttatattttctctctcccttccttccccggatactagcctggctgggaagaaagaattcacttggatggccgaacgttttatattgatcatagtaagtaggcgctgttatggacacacaggtgttgtgggttagagggaaggagtaattcaaacatcatagtgaaagctttgtcattttactctttatctaggcagccaggtgttatgtggagaaaatgataccagagaatcagtgccttcatacggtactgtgcattcaccccaagtttgcttaaagtagcccatcaaactttcacccaatctgatcttgtgacctattaacgtgtttttttttgttgttgaatttttaaaccacattttgattgttgatcccttgacttttgcacatttaataaatacactctggtaatagaaaataagattagaaatgatgatttagtcaaaaatctgtgaacagtgcttgaagcagcatgtaagttttttagacactgccttcaagggtcctatggcaggatgcccgctctgaccttattttctattcacggcatgtttccttgcacccacaacactaatatatatgtattttctggaaattgtagtatatttgctatagacatttgctccagcacctatgaaaaaatgtgtggtttctcattccaactaaaagttcaactaataaaagtttgctttttagccagtgggattttttttttctcattctttttggaggtgccatgttcttcatggaatcatatttctatgtcccttaaattttctgaaaaagtatattaaaaagaagccttcaaatagatgtaaagtttcaaccatgagtgcaatttggtagtatcttggtctttgctttcatttggttcatgaacagaaagttagggtttccctggcttcacaatttcataactaaacaaaagcacgttgatgagccacctgctgagaagtctggccacaagtaatcctcacacgtataggactggtcactatctcataggcatagtacgtttttcagatgttactaggaggcagagacattgtgaacagaatttcactttcaggccctgggggttgagggcttattataaatggaattaagcaaaagtaccagcagtttacaattcaactgaaagtagaagtcctaggtgtatttagaagagtgagctaccctttgtttaaaccagatatttcaaggtgcagagacttagtttttgtcttttatcaaaaaatgggcagatttgtcaactgtccagaatttcatagtaagcataaagtatttttcctgctttcatgtatgtgtatgccctacttttttccttaatatactatttatttattgttttaagagaatttactaaaatgagagagaggccacacctctttttcccatgaaaaacaaaataatagtttccggcttggtgcagtggctcacacctgtaatcccagcactttgggaggccgaggtgggaggatcagttgaggtcaggagttcgagattagcctggccaacgtgatgaaaccccgtctctactaaaaatacaagtaaaaactagctgggtgtggtggcgtgcacctgcaatcccagctacccggatggctgaggcaggagaatctcttgaacctgggaggtggaggttgcggtgagacaagatcataccactgcactccagcctgggcaacagagggaggctgtctcaaaaaaaaagaaaaaagtttcctttatagtattttttatacatcacaatcacagttttaagacaggtgtgaataatactgatcattttactaaaacaggtctttactggtaacacatcctggtctgtgacgcatggagagcattgcacacaatattgtgacagttttctggctggagatgtgatgcttaggtccccctaaaaagaatgttgtgaatgtgtttcgtataccgcaaggagccaaaaacagaaaaacacaattacaaagggctgtcgtagcatgcgttaaaatagtgaaaatcactgactatttcacttgtggtgtcatagacctagtatgatacatagcagatgcttgatacttggtgacttgaaatcaggttcatggaggatcagtggtgaagctcttaggaagttgttgtgcttgatcagaaagtgaagtgaactcacttgaggagcagtaggtgcccccactccggctttccacccccaccggcctgaggctagcgcaactccggcttactggaaggtggaagaaggtaactacctgctagatgcctgggcttttccttactcctgatcagttctgcagttactccagcactctgcccaaacatttcctcatttcacttgactagagcagcacccccgaggctccattatactctgtacagagcttgatgcaactaagctgtgccaatatatttgtggccattgacttggagattaaaatttattttgcccttgcacaaccatattgaaagattctgttaaagagatatagcataaattaagtgaccaaaaaccatttaagaaaaggatttgtttacgagtgcctccttagctgttcatgctacgtttctaccatcgctccataattcatcaaggtttactcaatggaaagctgtagagcagtacacgtcagtgaaacagttcaagtcatttgcctttccacaaaattcagtctgtgaaaactgcagaatacctatcttttgaagaggctttatcaggctgacacatacattccaaatgggttgaattacctggaagataacatttaggaatgtcctttctgtcagaagaaagcctctttttctaaacaatcttatagcaaaactcagcatctgattttgctgtcataatgcctacaggacaggaaccaggttatgcccacgtatgccacaatgccgtgagtgccgtcatcttgtaaattgcttagagtcatcttgtcttccagcatacctggcacgtgggtccacctggaattacagatgagatgatgagatgcacttgtcttttcaataattaattatttctgctttgtaagtttttcctgagaagttagacattttcaagatgaacaatactcagccatcataaagatttaatttcaagagcaacgaatgatcgagactaacctctttagactcctcgattcctttgtttgctgtctatggaatggctcctggctcttgggcctcaggtgggaggttaaaggaaggtcttaaactgaatctctacatcttgtaggaatgatgtcattcttcttaaagaccagacaggcccagcagctgagtaattggccacaggtatcctatctacaacattagaagagaaaattgaattccagtgattttgtaaagtcctattttagtctttcctgtcaacagtcttactagacctgttcatcgtgactaaactgagtttctcatccttccacttccttcttgtccttttattggaaatatatctcaaagaggaaaagcaagtttaaaagccaaagttctttaaaaaaaaaaaaaaaggataactggctaccccatactttcatacattgaccatacttcactgaagaattctttatcataaccatgtagaaacttgtgttgttccaaaagcttaggctctttttaaagggactttgttttcaccatcagcttcattcagtcattaaaaaaataatgcactaagttcctgttacctgctgggactggtcttaagtggtagagaggggattgcaaagatgaataacacacagtccctgtccttggggaggttaggtccagtgggaagtagcaggggatatttcaggtgttagaggagtgaatcagttgttacacagaaacagaagaggcaaggactgcatctgcttgggaggtggttgggcacagggatggggccctgagagaatgggtcactttttagatggatgacaaacactgagtaggattgaggcagtcaaagccccaggaagagtgatcctaggatgcgtggaggtgtgtgaatatgtgcagatgctgccacgttccgagaaacgcagcattgctccaaacagctagtgtgccgcaggggcgcacaggccaagccaaagggtatctgcccggtgtggggactcgggctcaagccacaggcagtggggagctcccaggggatttcccagaggggagggatggggtcgaaatcgttatttagagagatccttttggcagagctgtagaagatgtcttgaactggggttggggggtgagacaattcccagtgacgcccagagaacagttcagggaaaaaaaatgagccctctagcaagaagcttatcaggaatagagagggttggtccgggaccaccagagtgagtgacacggccaggttcctgattgggacagtgagtggattgtgatactgcacattggaatgtaaggtcacgttaccaattttggtgttgggtgatcagaggtttggttttggtagagttaagctgaagtacttacgggaaacccagatgcagatgtccaggatggagcttgaagttcaggtctggtctgaggacttgcgaatcccaatgagtcaggagttattcatttattttctgctttgatgacaatatccattgatacggttataatccaagttggtgttttaaggcgcaatttttactcagctgtactccgtttcctttatttggttttcttttctcttgttttccatcacaatagcaacttttactttccaaagtcttctgtgaaaggtaagggacccaaaaatgccttttgcttccatcaagattctctcaaacagttgagatttttcatgtaaattttctgccagcatgaaaacaaaagattctagaatcatcacttgctttggtagcttttttttttttttttagcttttcctctgcttctattaaaataataataagactttttaaaattcctaatatggtcattaaaacagaattcactaattattcttatcagctcacttacagtgtatacagaaaataaacagaatcaatattcttcccctgcactcccccgccccggtccccaagacaggtgcagatcgggctggagcatagtggcacagtcatagctcactgcagccttcccctgggctcaagcgatcttcccacctcagcctcccaagtagctaggactacaggcgtacaccaccacacctggctaatttttttttttaaccttttgtagagatgggtcctcactatgtttcccaggttgggcccgaactcctggcttcaagtgatcctcctgcctcagccccccaaagtattgggattacaggcatgagccactgctcctggccaccctttacttttcaaataattttcttcttctttttttttttttttgttttttactaacctagatatccaaaaactctggagaacctactctccctagtgtgccccaccccccgtacctttcatgtgagtccattgcactctctctccctccactccaccctagtacacacacaggaatccgtaaggtctttttaattatgcacagttacaaacaccaagtgatctaaggcagctgttgtgtattatcacctacacaagtaatggtatagatagcattgaacagtcttgtgcacattaactcacttggaagaaagcaaaccaccttttgccagtgtgaccaaacagaaaccatgctctgtaatcttcctctgctgtatctaattctcttttttggactgcctaagctgctttgatttttgtgtgcatatgagtgacgcatgtaatagattattcatttgttcaatgcaggattcttaattgaaagcagtttttcaacaccataagtaaagagaaaagtatttgaaatgagaaaaaaaatcgtgtgtgtgtttgttagccttttgggaaactaagactttttaaatgctttttttcaactaaatgaaaatcaagatcaagttataaatccttaaaagaacaggggtttataattcccattttagcaagttatttgcccaaaacagtatgaatagatggtttatctttagttgtgcatttttgattgagtgtttttaactaaacagtatgtgaggggggttgccatatagactgtagttacctgctaactctgaaatactaatttgtctttagaacacagggtgggggactggacagcttttgaagaatccagaaatacttccttccaaaactttctttacatagaatagatttgaactaatgttctgattttttttttttttttttaacattttcagatagcaaaattactcagtgggaagacccaagactgcagaacccagctattactggtccggtcagtattttcaaattctgcctcttcagtataagattttggttacgtgtttacgtgtttcttgtgtattactgataacggtgatgtcaagggacaacggtgattgagtagttgactagaaacagagcactttgctgccatctccttactgaagtttccaggtgaggtacagctgcatgtgccttttcagatggatttcattataaaggaaaacagcttgataacgacagcagaattaaacatttttcttctcctttataaaagggtggactataagtatagtcaaaattccctcccttcctttttatatgaagcaaaaccaagccctatcttcataaagtgttatcatttctttaggccaggagtagtaaatgtatgccaaaagtttaaatcttttacaactttcaaaaatctgtagaagtttgggtgagattatagctaagttcaggagctggcagagttaagagtttggaactctgccgacccacagtgttctcatggtcccctcatatatgccgggtggaaaaagaatcaattctgatgcaggcgtgatgacctcttaaaacaccgtagcacactgtgttcataaggcagtgtgagaaccccactccctgaagcatcaggagacatttggtatctcacacttgttaacaagtctgtagaatgggaccacactcatcagcagagagcacaccaccagcttttgtcagtggctatacgagtgcagggaggtaatttggaattacaggagttgtactgcgatcagcagaagattgcaaatttgggattcttagaccagaggagcaaaaggaactgaagtttgttatatcacatgctgagctaagaggccagtaggtagatttaaaattccaatttcatggctttaatctgattccattcaaattatgttttgaattagtaagatacatccatttgaaaacttaaaagatactacattgcaaatgtgccccggtaactgactcctgttagttacttgttggatttgtttagtcatttgggtactatttcctaggcaaagtgcccagtagtacctgggtaaaaacagtcaacttttttctctatgcggcttaaacactgccttactctgatgcttccttttgatatatatatattcgcagtcacagttgtttattggaatattattttctcttctacatcattagaacaaggtaaattcaagaaactattctttttaagtgacagaagacttttgacataactttgaagccttttcaaaatatttttatcacttatcaattaccggccgtcactcaaacactgctagtccttattaaatcttactgaaaattgctcagcatcataaagccaagtagatttgcccccaagaaagagctctctgctttctgttaataaaagacccttgtttattccttcatttttattattattattcattatattgctttcaatagaggagaatctgtatttaggtagttatcaacttagtgtagacatttggcctttgttgtcattcagttctaaatatttggcaattttcatttgatttttcttcttgacttatacattatttaaaatatgctttttagtttctaagagtatgggagggttgtgcctattcatttttttttattgatttctaattttattgcattatggtcagataatattgtctagagaatatttattattggatgtttatttaaaacttcattggaagcttgatcactttttgtaaatgttctttttctttttaaaaagaatgtgtattgtgtctttggttgaatatagagttctttttgtgtccattaggtcaagcctgtggtgttcaaattatctacattctcattgctattttgctattggatctaatcaagatagttctgtcagtctctgtggtgactgttgccctgtcgatgttgtctgaggtgtatataactacattctctttctctgttcgtatttgctgtttagcatatcttttctctctcgcgatattttatcttctttcttgccttttgttcaattgatagagtactctctattttattttctctatgtgcttgcaggctgtactttctatttgtattcttatagctctcacattaaactgtgtaacccacatacttgacttagggttaaaatgaatcactgtctactctccttaacatcaggacctcagggaacttgaatgccattcttcccactcccatttgccacgtcattgttgggtggaattttaaaactaccttgctttaaactttcctaatagtcaaatagtcattaatatgttttatcttttttctccctactgtccatactgatttaattttaccaaatgtagacaaatttctttgcccaccattggtttgcccaccattggttcttccatccattttttttctggggtgagttttgatcttagtgaagcctagtccagtttatggttcttactgtgtggtctgctgaccagagtatcagtatcgcctgagagcttgttggaaatgcaagttttcaggtcctaccccagacctactgaatcagcacctctgggggtgggacaccagtctttgttttaactgctctcccagggattccagtgccccctcaggtttgagcacttctgcccagcagcactgccagtgacagtctgagagtggtaatatctcttagtctttgactcaaaaggtctcatttgacctctctgaagttcagctgatgatagaaatcttggttaaattattttccctcagtgctttggagattctcctgcatgtcttctggcctccataaatgatgataacaggtttgctgtcaatctcattgtcgtttctgtgtaggtaaatggctctgttctctagtgattttgaatttttatttgtgtcttagatgttttacaatttcgctatcatcatgtacctatgtgtggagttctcttcatttatcttgctttggactcaggcttcttcagtatggggattgtgtctttcctctgttctggaaaattctcagctattatttcttaacatactgcatttttccgattctctctaagtatctgtttctgtaactcctattggacatttacttctctttcacattgtctgctttatctcttaacttttgtgttttctgtctctcactgctgtattgtgagttattacttagctcttccagttaattctttaagctttttttgtaatctctttatcagttcattgtgtttattatttcagtgactaaatttaattgctcaaagttttatttggtcgtttaaaatttgcttttgtcttcatagttattttgtcctgttctctttatctctttatttatttttgatgctttcatctgcttattatttttaagatatttatttcttagcctctttgagattattctattatctctggtcctaggatcattaaatctcccactacgtctgtagactctccttaagagtgtagattattgcctagttcagtttataatttgtgtgtgtgtgtgtgtgtgtgtgtgtgtgtacatgcatgcaagagggagagagagagcatgagcaagctcatttttttttcctatgaggcttttgtaagtcctgacctgtatttactgttaacttcttagcttgggttcatgcacccccagtcagtataactgtggacctcatacccactttggcacaggcttggagtatggatttattacaggtctgtttctttttgtttttctcccatttatggtcctggacagaaggtaagcttccttgcaacttccctggtccggtgggtagagttttcttgtcccctttccagatgttaggttttaaacaatgactgttctttctccatcatgtagaccaaaggccaagttctgtgtccccatgggagattaaaacccaagcccctatgtctaggtccagtgcccactgatttctctaattgtgagtctttctgcttacctagtacctagagtttctcttcccaagttttaaaaatatcagttctaagtaggcctagcgtttctacatatttttagggagaggggaccctttctgtggcagctcagtgttcagcattcctgtaagttagcatgctctgtgtatagcagatatcactagtaatagcatttagtaagtgatgttcacacatgctgctgtcatgaacactatctcatgttgtgtaacactttcatttttccaagaactttataatcagccgacttgaaactcacagtcgtcccctcagaaaggcagggcaaatgttgttatttccaatttgtcagaagctcagaaagcttattctgttgctgacagtccttgcaagggtcagaatcaggaccggagccccagatgcgctggtgtcactgatgtccccgtgccgggcatgagcccttctgtgcaaggagctccaatgtctcccggccagtgatgatgtgaaaacatttagaaccgacctacacaataaggcagattttcattctgtacccaaaacaggaacacagatttaatgcagagcaaaagggctttaatcaacagatatgttcatttttcacgtagacctattttacaagctaacttgtaagccagaaaatgacattcgagattttcaagtgagaacaaatgatttggtccaataattaaaaaaaaaaaaatgtacgtgtaatctcttcagaagctgcactggaaggatgtttgtcctggtacgttgttggaaagttttcaggaagagaatgtaaaaacttgctcttcttattctatcatgagaactacctctggagagaaaagataatgaatgcaagaggaagacagtgatttttcagctttcacgcatcattccccagaaggagaaaggcttgaaatatctcaacatttccgcccacacctcctcagcccctgccaggagacagagcaggcaagggaacgggcatcataggctgggggccacatgttgaaatctgctccttggggaatttgtcatttaagacagtcgaacttgcatacacagtgatgactgtttaagctttttttccaacattttcaggagtagggggaactgtgatgtaacagtgatgtttggagaaccctcacgaatacaggaacaaacaaaaaatagttgctgggaatcacagactttcagaaatagaagagctgagtcacgtttgttcatccagtcaaattcttccacttaacagtgaagaaactccttagtagagaggatgtgatgcagagccagctgatgagagtctacccgagagtgcaggccttctaacgctggcaggagagagtggaaggaagtcacttttttagttcctatggggtcatttttttcctcatggcactaccacggtttattcattgatttcctattgcctgttgctctcaacagcttgtgagctccaggagggaactgggaaagctacctttggtttatgtactgttatttttctggcacctaaaatgccttgcacagagtaggtgctcaagaagtatcggttgaatggacgagaatgaacaccagaaagtgagaaataaactagagaggaaatcttagtttgtgacgggatgtactgttggtagagcagaaaacatgatctctttattggcttatgtcagaacattgtattctttttcttattttggtggttgtccaggtattaacaaatttataccttgcctagactcagaattgctatgtggtttcatcagactaaacactgcctaaaataaataggatgtgaggtcaaatctgttgttcagtggaaaatcaaagaagactggcttaaaaactaagaaaagaccataggcagtgtaaattgtctatagattgctcctaagctatataaagatgatgtattttttgctctggaattacagagcaaaacactgacgtgctcattttctggaagagtggttgtttgttttgtttcgggttttttatataaacatgtcttaaaactataaaagagggaagttcatgttcttcatttcttctgtttctggtcaagataagtatggtgaaagtgtaaggtttggagtctggagatactagactaaggatcagtatattttattaacttaggccgaaatgataacagcagaagtattctctgctgaaattcatactagtggctaaaaagcaatgagttgttttcgaggctgtcatagttaatgtctgtgtatatgcaaaacccaatcctttttgctcataaaaatatcgtaagctttttcagtagccaaaactcacggccctgactctaagatattgtaagctactttacaaggtagcaaataaagattatttaaatgactacattaacatgttactcctttgcctgaagagatatcacaacttttgaatgactatagttaactcaattcctgagccctcaactggggtactatcactctatttcatagataaagcatttgagatttaaagaaatccttgcccaagaccactaaatattaagggacaaaccttctgacttctaaattgaggattttttgagaatgccatctgcctgattttatattccttgataggagtgtcagttcacttccctttctgctcgttgtatttccccacaaaaattcgttaaaccgtaattagacttttcaaaatgccaacgtaggtcattctgggttgtatgttagaagtatttagccaataactcttacctaaaccacagcaaaaaagaaaaacagaaacaccctgactcatattctgacaaaagtcacttggaaagcatgtttagtttgtgtagcgtaccccaaatggtttctcaaatagcagtatagctgttttcaggggtgaaagctgcattcaaagctgattagccctcatcagttctaggactttcccctgtgctgtgtagacattatctaatttttccatggataatctgagaagtgagaatttacggtttatgactcatgaaattctcttgaatgttgcctcagtatacataaaatttcaggtgtattgtttgcattatctatatttataaatttatcttccaggctgtcccttactccagagaatttaagcagaaatatgactacttcaggaagaaattaaagaaacctgtgagtaatcatgccttccaaaaatgctttgtgttagtcatttgtaagttaccacagtcacttcagtgagaacaacttggttgttacttttatatgaatgctaaaaatattaccttccttttctctctgcactttgatcctcctggttctaaaatctgaattttctttttaacagaaatggtaagtgaaaattaactcagtgttacatatcaaatcacctgaagggtaatttcctatgtaatacataaaaagacaggaatgatttttatgggatataaaataattcagaaccctagtcacaaaatctgtggaagcctattcaattatgcgcagttatcatatttaattaacctggatcccggtaagaaaaatgttcaagtccttccttgtaaatgcaaaagcttagtttcaactacagtatttataatatagtgttatatttaattataataattggcagtattacgtccaaatgtaattttctacttataattatccctggcagtttaaaacctagaaactctaaaaatttttatgggcaacattttaaattataacattgcattttctaatgacacaccatccccaaattgttcaacattgcatcctctgttttactttccgattcctccttagcagttttctcttcaattttctccatcactatggttacacctctagggaggggagagaagcggctgcagctcagaccccctctggtggcctgggctccattgccatctctccctgcctcctcccctcagctggttcctcctgcccgggaacatctctggatggggcacaatgtctgctctcatttaggggttttggtctctgttccaaagtcctgattcaagagcttgcgggtaactgctattgaaatgattctttgccttcaaaactcaaatgatcactgaaaattccacagttttctttgtgagtcatgtcccctggtaatgatgatgactgtggtcatcacccagtctcactctatggctctcacatagcagtgtctgctacccggaaaccatctctgcacattcattcttacagccagaccaagcctggaccgcctctttgcaggaggcagttgccacaaccttggtcaagtgttttgttattttcatgtcagcgaaccatgctttgggctgctttccccacacttggcataatcaggatcccactccccatggcaacaaaatggacttgaggcagcgtggattatatctaccacctggcggccctgccacagttgagcatggataggcccaacctggccaggtggggattattacaggttttgactacctgggctaaagtctcttgagtgaagcaacagatacagtcgactgcctttcggttgccctatgctggagaagtgcccacagttgtttattaaagggggcaaggaggatgttctccttcgcagcagagttctaactttcctgagcatcgctagtggatgccgtgtgtcccatcgtgacacagcaaggctttctgtctgcaagggaaaacccctaaaggagagaatctcagttggaaccatttgtcactgcctgtttctttgaggactgccaacttttctaccatttgctgttgtttttattagaaaacaaagtgtgtatttactgtatgattatgtgttttcttttgtcttttgtgtaggctgatatccccaataggtttgaaatgaaacttcacagaaataacatatttgaagagtcctatcggagaattatgtccgtgaaaagaccagatgtcctaaaagctagactgtggattgagtttgaatcagagaaaggtcttgactatgggggtgtggccagagaatggttcttcttactgtccaaagagatgttcaacccctactacggcctctttgagtactctgccacgtaagtatatggccacacccagtgtgtgtcccccactgagacagttgtatgaatttaaacagaatgaaaggataagcagctcatgagttcgagatgcattaactctgctgagtttgttctctcctcaccccacagccccttgcaagtctagaacaggttctgactctacgtggtgaaatagtgtactctgcgaacatctaacattgattttttttcttgtctattgggttcatggagttgaaattgaaaacgtggataattatgataaggaacaggaggcgattttcatttgcagtgttcaagaggaggacttgtcagtgttagaattcaaaaacaaaggaggtgttttttgaacaagagtcgtttctgaggtctcctgtgtaaaggcaaattgtaaggactttgaggacctaggaccatgccctgctcctgtaaggaaagaaccaggtttccccttgcattaggatttcatcattgccaggcttggaaactgaggcagactaaattgctttctgagcaattaaacatcagctacttccaggccagccattcctccttcagactctgaatcctccaagggttgggcagtacccaagcccccagtagaatagtcattgaccttgctgaagggcatttgtcatcactccagccctgggctctaaggggacgtgggttcccccacatctcccacctggtaccagtctcctgggggctcatttggaaggccgcctcagtacattcttcctggttgctctagccaagaattgcccaattgatttgttgttactgagtcccatgagaaagcccactatgtacaatgtatccaactattgaaggtggagggcagggtggagagagacaagatctttacctcttctccacattttcaaagatacccccaccccggaggaatcagtctgtgatcccagtttgaaaactactgatccacatgattgtgaaccaagcaagatcatttggacaaatctaaaaatttgcaggtttgcatcattgagagagccatatcctgttcctaatcccctcgaggccttttcagagcagagtagtggtcagaagacagaccaagggttgggcccatagcaaacatcttatggccaagccaaaagcctctggaaggaattaaacttccttcatcacagagacgacctaaagtactcacatctttgggaatccctgcacagcccctttattatgtggcgtttctcatctccccaagatatttggctgaaccatatgaaatagacacttcgtaggtcaaaaacagtcaaacatcagcgtctcttatggtttaattgactttagagggcacatgcgtcagcctccatggtgggtcacggttgagcatgtggtaagtcaggtcctctagcccacacattttcccactaggtacagaatgctcgcagggacactgtaaaagttgagtgacaggtggcaaacaaatatgcaaaatcttgcatttgaaagtgtgattgggcttttcttctctttctcctcaaaagggacaactacacccttcagatcaaccctaattcaggcctctgtaatgaggatcatttgtcctacttcacttttattggaagagttgctggtctggccgtatttcatgggaagctcttagatggtaagtcttgaagtaataaaaataggtcagtgctgcttgcggtttgctagtaggtgtcttatctttcgcatcatgggtttttaagcaaaagcttcactggtttactcataaagtatttttatgttttgcccataatggatgtccttttctctggtagcttattttgggcactgaagacatagtgtctacacacagttaaaaacaaaagtttttttttaacttcagtgtaaaacacagaacattatgtatttatacatttgtatgttttctggaataactttagtgaaagcaagatttgataacagatggaaaaactaattgaaaagttaattaaaatgatctcatctatctaatatcctgtgattattgcgtttgtccccaaattattttttaatttgaagggactaaataatttcaaaataatgttactgcttagctaagacattaaccctgaaacaaataacacaaaataatttcattcttatttaaagcatatagatcatggaagaatttcaaggtaccttgaaagttagaagtcaaaccctctacctggcggtatctataggcttagagacttctaaaagatttggccaattcaaaatagtgtccttaagaaaacactacagaaatcatcagtgagaaaaaagcatcagaaatactttttaagagcctggaggtagagtggttgaggatgggaagagggagagtaggatttgagattgacattgcagtaacttataagaaagatatttccaagggaactgtgttcattgcatttatagagccttagctattctaataaataatttgtataccctctgtacttttcccatgaatatgtttttactgttaattggtagctgatattgatgctctgattttgttgctttatttggtagcagggcgacagtaaacactttttttcctctagaaggaaactaaaccacacactctttccatgtatgtatagtgtgaatatattttaatttccagctttggagtcatgccatagattgtttcagcctgctccaattcactccaactttctcagaaggtcagtttagtcaccgtatgcaagtgagaagatgctgttagttgctacagtgtctttaataccctctctaacagggggtaatagagaagcataagatatgatcctgaccttagtcagcttatattttagcggggggaaaagagatgagaacaaaaccagaagaatcacagtgatagtgtctgagcagaagggagtgcattgagtcctcagaggagaaagtgacttggctggaggctcagggaatctttcccaggatgagctgcacctcggaggtggggtagcatttgagcgttcaaaggctggggtcatttcagatgagtgaggaccagcccagagtcaaggccttgtggaagaagatgggcggaagcaggaaccactcagggtctcaaggagctggctaaagtgaccccgacaagagtgatcacgatataaacctggaattgcacatttaagagtccaagtgcacatagatgggcctagtcagcagtgtcttcaaatttcccacagatgggaatgtccctgtcggcagggctcattctgcacatctgtccgatgggaatgtccctgtcggcagggctcattctgcacatctgtccgctgctccccctggtcggcttcatgcttttacttccccagacactggagtctattggagcctgcatagggccacgctgagccggggagaattggcctgtactgcagagggtgggtgcctggtggggggatgaaggagcagaagcaggagcctggggtgccaggtctggtggggtcaggaccccctgtgaggaggtgcgtgatgcctttggatcaggtgaaatggaggcacctgcaggacgcctgaatggtgggaggccgacctcgctgctgttgcctccctgaggcctctgccgtccctccgcggggggttgcacaggccctctccggggccttccccatttccagcctgtccccttcctgtgctttctccccatcgctgcccaagcaatgataacagaagacagatggaatttcacctggcctttcactgactccccactgccctcagagagcaccccaactctccagcaccccatgtgggctctgcactgccngccccttctctggcctgtctacccnccctggcaaacggctggcaagtccccagccttgttcctctgcttagtgtgcccttttctcccccaattcctacgcctgatttgcactgcggactctgcttgaccttgaagctcatctgtcacctcccagaggcctttctggccccactctgctgcgccatctctcttagcacagctgccctcctcatgccactctccccctgatctcgcctcctcgctngtgcaatactgtagaaggcccttggttactccttcatggtttctcatttacattgaaagcaggttaatcttttctttcatgctctgatacatagcagtgtcaaagacctgaaactaaacccagtgtttaccgtgttttaggtttcttcattagaccattttacaagatgatgttgggaaagcagataaccctgaatgacatggaatctgtggtaagtaaatgcacgtcacacactggccatcaccgggcactcgtgtcttatgagaaggtattggagagccatatttgtagtctcagccacttttatgggtgttgcattccatgtgaacaacaggagacatttaattgcttgaaaagttcnttgatctaattcttgtaataaatcattgttcacatttcctggaaccatggtacctagggtggatacatccaaatcccagttgcctctgcttacccggcataggacttgtgtgaacttactaaatccaagagacagctgaagatctatggtagcctgtgttttctataaaaactgctgctgctgaatgtttagagcttcatccgctctccctctgtttcctgacatcataaaaatggcagaggcaaaggtcaaaacaataggaagagtatcaggcagacgtcctagacatggatgagtgacgccacagctcaggcaagtgaacacttgagacgttctccaagtagtgatttgggttttcatgttgcatttaacattaattttacctagacagaccattttagagttggaaggattttattttttttttattttttttattttttgagatgatgtcttgctctttcacccaggctagagtgcagtggcgcgatcttggctcacttccgccttgcggattctagcaattcccctgcctcagcctctcagatagctgggattacaggcacacgccaccatgcctggctaattttttttttttttttttttttttgtattttagtagaaacgaggtttcgctatgttggccaggatggtctcgatctcctgacctcatgatcctcttgcctcatcctcccaaagtgctgggattacaggtgtgagccaccgcacccagcacggatttgctataaaacaaaaattgatgttctttttataatatacttctgcttctgtttttcttttaatgtacctataccccacatctacctccagagtgtatgggtgtttgcccacacgccagcacacacacagggccactgggaagcgcgtttgtccatttggggtatttgcagctcattcgtgtttgctcacttgagttaaaaagcccctgcatgatgtcacctgcctgtgataccaactgtattttgggcacggttgggtagatgagctgtgtcctcggccctgaccagcgctgactcagtgtttctgttgctcctcattgtatgaaaggagaggaagaggccagcagtgcccttgaacccactgctggtttgccagtcatggtgggttgggatgcacacctgtgattccggtctccactttgaccctgtgtttgtgctttctgctttcatcactgtatgatgaagcagctaggagcacaggaatttctcttaacgtctaactttataccacatgctgacagttagtgcctaaagtacagtgcgtgtattatttttaccctcttcacagcccgtcgtgtccccagcaggagagaccgtggagggaccagggacaggcgcttaggcctgtgactgatcctctggattctgaaaccagagcagccaccctttttgctgacattaacctggagagtgatcaaagcacaagaaaggggataacttaaaactattggtatttacttagttggaacattattttacttatttatttttttggcgatagaatcttattctgtttgccaggctggagtacagtggcacaaccatagttcactgcagcctctatcccctggcacaagtgatcctcctgtctcagcctcccaagtagctaggaccacaggcacacaccaccatgcctagctaatttctttttttttttttgtagtcatggcgtcttgctatgctgcttaggctggtcttgaacagcctcaagccctcctcctgcctcagcctcccaaagccgaggattacaggattataggcatgagccagcaagcccagtctagaacattctttatccttcctgttttcctcagatactttcactctttttttaaactttatttattttttatagagacagggtctcactatgttgcccaggctggtctctaactcctgggctcaagtgatcctcccaccttggcctcccaaagtgctggaattacagcgatgatattttcactctaaaaagatagaaagtatattgaccagcctggccaacatggcgaaaccccgtctctactaaaaatacaaaagtcagccaggtgtgatgtcacacgcccgtaatcctagctactcaggaggctgaggcgggagagtcactagaacccgggaggcaaagattgcagtgagccaaggtcatgccattgcactccagcctgggtgacaagagcgaaactccatctcaaaaacaaaaaaaaaaaaaaaaagagagagagaaaagaaagtatacttatgtctgtatgttaaattttgtagaccagtatggcagctccatccaccatccagagtaggtgccttccactgtgcatcactaaggacaggatttaactgcaagctcattacaactaaagcagtttgtttgtttatagtttaaagaggaaggtttggtttaggtggagcaggaaacattgcattagtaacatatttcttgagcattctgcacagaattacattagaatgtaattaaagaagtcaaatgagtttgtattttggggaaaaaatgctgaattttcactcctgtgtcattctgtaggatagtgaatattacaactctttgaaatggatcctggagaatgaccctactgagctggacctcatgttctgcatagacgaagaaaactttggacaggtacatgtgggtaaccctgggaactcttctttagctttcaaggggcatttttcttcttgacgggctgtaacacaactttgctggaccatcagaaacaaccagcaggagctgcaggtgttaattttcatctcattgtagcagcaccttnttgtcatgccaagacgccacactccaattacaaccatttctctcttccagcaaagttacagaaattccaagaggccttggggcatgaaccagcacctcttctaatccaaagcaaatgtgaatgtttcatttgtgcctcggttttagaatttaggtacttgaaaaaatagtgagattgttgacttagcgatgtaaatacatgaccaggagtgggtgatgttggaagggccattggtttttctctctgttttatggttctgttgtcatggcgacatttgtcttgtgaggctcagcatggcaggctccggtttttctaccattccctctgctttgcccccacgctgttattcaggctggactaatcctcaaagtcagtttcagactggtcagcagggatttggatgggccactgaaagtggatttcaaaggtaaagttgcctgcttggaataattctcatcatgctaaggatctatgcgatgtatttgtctcaattctgaagcctttgcttcatctgccactcagtaataatgatgcagcttgggaggtgttctcaatgtattctctgaccctggtacctgtccttccgcaaaagcccagaggtatttcccatccttcagactaaatctccacggctatgaaattaattagaccatagaactcattgtaatggttgccctctgaaaaatgaaatagacgtgttctttattgctagatgtcaaagattgctagagaatctttgagaaaagaagctgatgccactagaggatttaatgacaactgagggtaaaaattgttggataagaaaataatcacattaatatcagaatcacttgttattcccatgtcctgtgtttgagccaggagagttcagtctctagtgtgagtcctggtgtgggtggaacctggggagtccatagggcccttcagtggctaggcaaggctcagagaaggacttcaggcaccagaggcaagagaccttgtggcttaatgtaaatgatcaagtcctttaaaaatctccttttgtgccccctccccactgcccccctttcccggcctcctccccaccccactgtgttgtgctttatgcctgagaatccttacagacaggcggacactgttctcctgcacggggaccttgtgatggggcagggaggggtcttttcagctgctgcccctctggtctccagcagcctccccaggaccgagagtactggtgtctccagccctgtctacctccttcctctgctgcctttgacacaaatagctcactccccccagagacacctgcaaggcacagtgcctttcactccgggctctcacccctccccactggtctccagtcccctggaagtgcatgctcctctgctggccctgtggatgcaggtgtcaccctgccagctgtcctgcacccgctgcttttttgtctcacccttgctatctggatttcctcatcctacctgtggctccggctgcacccatctccgctcaccaccagcctcttatctcaggccggcgtctgccttccagcctccagaattcccaggtctaacggcctcctcaactgcttctcctgagaggctcacgggtcccagtgctaaagccactttttcctccccagcccccacatcggttatggtctcatcagtgccaccactgtcccctcccacctgacacttgggcatcccctcagaatctccctctctcctcatgccatctcccctcctcatgccatctccccgtgcccaggcttgctgtgccccgtgactccccgtccttggcacgtccctgtctgtgcactcccctagccctgctccgatcacttcttgactgctgttctcacagcctcctgtcggccgccccctttcctgctttgctgttctccagtgccctgttctctagtgcctaccctgttctccagtgccctgttctccagtgcccgcctagctgtgagccccttatggactatttctgaaatgcagccctgaaaatgtccttcttctacttggccatcttgtgaccttcagcataaatgaaaactgttagcatggcatatgacccctcataatccagacctacccccctctggcattaccctctgacacctccttcctgtcaacctgtcaacaaacagtgtgccttcaagggtttccccagagatgcttcagtgccacattgctggctcgacactgcccactctgtaccgatgcattctcattctctctcccatcacctctttccctgccatcctcgaggtattgactgacgtgctgtgtgctgtatgccccctgaggtcttctgggtctctccagggctcagcatgtagttgatgcctgccagtgctcattgagcaaacgaatgaggagtgctaacctggcttattaaaaatatgaataaggtggtaagtaatagaaatcctaagtgtgagaaaacaaaatcagtcaagtcttggtggctttttttaaaaagccggacctattgaagggtcttaaactgccaattttcaaacgattagacatggttagtcaccctggaagtatcttcctttcatttttaacatatgaaggaaggagtggaagtaaagaaccaaggaagactgaaagtcagtcttgtgtgtcacatgcattaaaaaagtcttttcgtagattcattcatagaaaaccatatgaccaaattaacccaattcagaaaactattaagccacaatcagaagcaaatgatctgggaaaccttcctaattacatttaaatgtaattgtttccacctcataaatgaaagtcaaacacagggtgttggagtttttaagcaggcctctaataaatcttctgatgatcgttcaggccagattttcattaaaaacagttctcagacctcctcgtttaatgttgtgaattcttctgacttttgggtaggatcaagtagagtaatgcattaatcaaaacagacccatgagatgagtaagataagaattaggtgcccagtttgttgaattactgccttgcctttttgagagagctatcctgattaacagggaactcacgtatttattttgcactctgggaaggaatttagagcaagttaaatagctgcatatggatctcatctcccatatccagtccatcagcgagttgttcacacacctcccaaacctttctcatttctgtgcattctgccgatctcttctctcactcacacccaagtccaagctcccatcttccccactagacccccgacccgtctctacatccaatatggcttcttataatggcagagtggtctttttggaatataaaaatgagcatgtcattcctctgccagaaaccttcaggggtctcccctgcccttgagataaagaccccaaccttactttgtcccacaaggtcctgcgtggcctggctctccctgctcctcctccagactcactgtgaatcacaggccccactgggcttgtccaacacaagccccttcctgcctcaggccctctgctttctcttccatctgttgggagcatactccctcccagtctcagttcaggtgtcccttcatcagggaagccagcccttgacccagaccctatgcatcttccatgcctgccctgtggcatgtaccacagacgactttgcatttgtctgagtatgtttgtgtttagtgcctgtctctcctgctcagcttcctcccgatgatggcagccgcatgcctgccctgtgctcactcactgtcgtgtacttcccacaagcactttgcctggtgcatggtgggtacttgtagttgttgatgtggaaatctaggtgttagcatgatgcccggacaagcctctcacctctttggccctctgcaaaactgttgactctgacccagaagaaagcccattcctccccaatgccaaacagtcaagtcacttccacagtggggcaaagcaagtgcagttgtcatggggtgaaacagacatgcagtcagccttccacggtgtttcaaccttctttttttttaatttcacagttagaaatatcagaccatgaagtttggtagctgttccttcatgtaatgaagctgcagctgttgccattattttgcaatttgttttctttctgattggtaagaatctggggctgctggtttctagggcctaatatgaaagtttccactgaagaaatgtcagtgtttgaactatgatcctgtgccaagcaggaagaataagccgtacccccattcactgctgtgcacacatacctgcccccaccgggaggaggggcccttttagggctgtaacaagtgaaaattctttattgcaagttcagcagagcaacgtctaatttggttatgggtttgtttgtttgtttgttttttgagacagagtctcgctctgtcacccaggctggagtgcagtggcagaatatcggctcactgcaacctctgcctcctactttcaagcaattctcaatgcctcagcctgctgagtagctgagactacaggtgcaagccaccatgcccagctaatttttgtatttttagtggagacaggacttcatcatattgcccaggctggtctcgaactcctggcctcaagtgatctgcccacctcagcctcccgaagtgctgggcttacaggtgtgagccaccgtgcttggcctgatttgattgttttgaagagctgccagaagtttcaagaggctgtgcagtagttggagggagaccatgggcagcagccatataggaaggttctttaggatcgggtcgagccagtctccataggaatgattacccaaagggaacaaggaggacatcatctcagacattgaagtggttagtggccctcccagaagccacagcacattccacaggtgtactgtggatctctctgttaagatttcatggagagaggtgggccactggcagaaagaatctaaaaaggctctttagggggtgataatgaattaaaaggtagagaaacacttgggggaaggcagtgagtgaaaaggcagaaatggtcaatgagggagagggcagagcatgtcctggcggaagccaggagccagacgaagagcccggagctggaggtggctcccaggagcgctgaggccccggccccttcaggccagtcagggacacagaggggtggcacctggggagacgggaagtgggaaggctggcatggacttgctgcctccctgctgtcggtagttgcgctgctggagaggctggggaggatgaggaaggcctggttggtggagtgatgggggtgcagggtgctgactgcccccgaggccgtgccctgcaggatttgtgagcacccatcagtgggcgtttgcccagcagtgctccgtttccaagaatggagtctgacaagcagataagccttgctccacccaagtccagcatattccatatgagccaagctgtttctcagcagcttcccaggcagcgcaaagcatttatggagggtcagggagatgtgtgggaatcgggttgttaactggccaaggcagggagtcccccagaagttcctctgatctctgtgaggaagagagccaagtttatgctggggccagtagacttaaagaggaatttttctactgcagtgttctcccacgagctcttgctgagcgcctgctgtggctgggcattgtgttccttgtgtggggtcctccaggagcccaggcacaggagggcgatggcccagaaagccctgggagggcggggtgtgcgtttcgtggctgaaggtggcaagaatccaccccacagagcaggctctgcagactgctcaccagggagcagggcccctgggtgccagcaccagctccatctgcagttcgctgtttctccttggtcactttgctggatttctgcctccgggatgctgtccaccctcatgacgggggccagggcgctgccgcagcacctataggagatgcgcagggcagagagcagcccctgtgtgacgctgccccgatttctcccacttagggttgacactgtcacggtaccacccggtgttcagtgctgaggacatacagtccctcccctcctgtggtggcaacagctgatgttaagaagggacaaatttgggcgaaaggagaacacaggctgtagttagagtgatggtgagacaggaatgaaggcccgcagggaatctgtgtgcctggaggcgagcattagagtcagatagccgcctctccaacccccatggagcctcgtgcccaaccagcaaggactctggggcatcggccagtggcagtaagccagtgtggtgggctggacaatatgcctgcactgcaggagacggtgtcacgatcagcccccgacagccggtctcaaaagtggaatttgaagagtggtcattgcttctcatgaaagtgtcgccgtaactcatgaaagtgtcacctgtaacgaatcctagagggatgcatttctgtaccacggagggctcgagccgagacaccgagatctgggggcgtgacccctaacctagtagcttagggagcagaattacaaacccctcatcctgtgcccatccttgggccctctcctcactcccccacagagaaacccagggtcagaatcaaccatgagacttgacggctgcccacaggatgatttactgctgtgacctcatttagcatgggttagtgtgggcccattttttcttttctttcaaaaattatttatttatctaattataaaatattaacctccataataaaaataaagccagtataataaaaatatgtaaaataaataaatgtcacttattcccagtatctcaagaaaactcaggattaaaatttttatttacattttccagaattattctctgtaagcacaaaacagatttttttttttacagaagtggaattgtactctgcatactgttttcttttttattttatttatttatttatttatttatttatttatttattttgagatggagtctcgctctgttgcccaggctggagtgcaatggcatgatctcggctcagtgcaacctcagccccctgggttcaagcgattctcctgcccaagcctcctgagtagctgggattacaggcgtgagccaccactcccagctaatttttgtatttttagtagagatgggttttaccatgttggccaggctggtctcgaactcctgacctcgtgatctgcccacctcggcctcccaaattttttttattatactttaagttctgggatacatgtgcagaatgtgcaggtttgttacataggtatacacatgccatcgtggtttgctgcacccatcaacccatcatctacattaggtatttttcttaatgctatccctcccctagccctccaccccatgacaggccccggtgtgtgatgttcccctccctgtgtccatgagttctcatcgtttaactcccacttatgagtgaagctggaaaccatcattttcagcaaactaacacagaaacagaaaacagttttcaaattaatatatcacacataccttttcatgtcactgaatatcagtctataacattctaatgactgtgctgaattttactttgtagacgtgccatatatttttaaccatgccctgttggtagacgtttaggctattttagtattttctatataaacatataattctgtataaccctggaatactcacatatatacataatatatatagcatacaaatgtataatctggaatatacattttgtgtacttgactaatttttttccattgctataaactccaaaagagaaattactgtgagaagggatatataattttaaaattgtgatgcctattgccaaattataatatcttcagaaaaagattgaaccaattagactcccacccacagtgaaggggagaaccagttctctgcactcagcaacactggcttattttctctctcatccctgggcgctgcttttggaggaagcagagtgttttcctccttagccctcccctccccactttgtctgtggccgacccgctcattcagtagctctctggaaattacaactttcaggcaacaccaaagaaggctctgtgatcaaagagagagggctggatgaatgctggaaggagtgtattacagggattgtggatgcttatctacttgacctccttccccttccctgtgcgaggggaaagggtgggaggaaagattcggcttgagtgtagccgagctgtaccgaaagccttctcgataccaatgcctgggctgggatttattaacttgtcattgacgtggatctgataagaaaactcttaccgaaggaacaacaaggcagtctggggaggaataaatggggaaaagaagaaaagccaacctgggtttattaacacatagaacaaaaggtatggatgagcactgtccacgcacctctgagaaccagccacgaactggcagagtttcactgtagaaacatccccaccccacccccaagtggaagctgtttggcatcctccatccccaacacggcctgtacggggcaggagcagatgacccctgggagaaaatgggatgcactgggaagatggcagctagaaagggaaatggagaaatgaaggatgtcagcaaaaccggaaacgcagcaaagggattaaaattcacattgggcacagtgaagagttcagttgactttgcagaaatggaaagcatagtggaaaaatgagattccttcctgaataaagagaaaaagagaatgtcgagggaccggatggatgatgaatgtgttttacgttgaaaagccatctcagtgtgaatgggaacaagagccagtgcgtggagaagccgcatgagagacccaggtgtgagtgctcgggtcagaggggctcaggatctcctgggtgcaggtggcaggaccaaggaacccctggaggtggcctctgccagggcatagagttcatcacaacatggaacctccatccctcctgggtaccaccctaacacttactttggaaaaccctctcccctggcttggtttactctataatgcaaccagcaggcagaggaaaaaagatttagagggaaccccaccaaaatagtggcatggctttctttcagtaggagaggtgtaggtgctatatttttccaccttttttccccaaaatttctacaatgagaaaaaaacattttattttaaaatagtaggcctctctcccttccctcacgctggttactgtgctatgtggccttatggtaagctaggtctgggtcagggcataggagaaagggctgccctgattgcagctgcttttttcatgatcatgggtggtgctaagggaggaagcttcagggcagatgagtgaggagaaggcgtccaatgcaaataaatgccttcaaaaaccagataaatctgtctcttcagcctggatccttaagcttctttcttgtctttaagtttctgtttgcatttttgaaagaaataccatgcatcctttttttatgactagaaaatataattttcagaaacagaatgcattagaatttggatttctggagtcttgatgggtgtaccctgttcttttctctgttaaacataattagtttcctgataaatgaatagcagaggaaaaaatgttgctcttcattattgctaatatatgaagaataattaaaagtcataaataaccataaaacaatttgcctttaatgatagcatctttaactgtgtaacatcctagcaaaaaagcctcattggacattctcttgtgcacagagcccatttgccgggaaatatttctgaatacatgttgtcttccctttatagtaagacattgtcactcaataataatatgcaagataacttcgtgatagtaattgttgttttgtctttgtaattacagacatatcaagtggatttgaagcccaatgggtcagaaataatggtcacaaatgaaaacaaaagggaatatatcgagtatgtatacacatatttactgccttttctttgaataattgaaatgcatgtttggtcactgtcccttgctgaaacagctcatgcatttattatgggcatgagtttattggtcagttttcaacaaggtaagttcttttctggcttgggctaatgggaagttgaatatgggatggaaagtctgtcttgtatcatgactccattgagctgccctataaaggagcagaggagggagaaaaggtctatattattgagtaatacggcaaatactcttttggaatatgtggatatcaactaagatttagaattgcaacggagaaccacggtgtcagtgaccagcagggcaaaattaggaaccaacaaagaaaaaatattttgtctctctcccaacttcttttccataatagaaatgtatagaaatagttaaaatggataggaagaattcagcatgtgcaaccctaaggaattctttctggtatttgtaatattcttaactcaacttcagcctcagtggaacaaaatgttgagtctttttggaagtctagctgttaagtgattctaagacatttgtaccaggcagaagtttttctctgttgggcacgttacgttttcttttttagtgtatatgtgtgcttcaaatgcataactctgggatcttccaaggagatcccctggtgcaggggtgaggtgagcactgcagtgtgtggttcctggcacctggtttctgctctcttgtgggtcgccacagtggccctgagttcctcgtttgcattcagtgcttcgtttcaacaggctaggctccctcctttcttctcatttggaattggtcagaggtcttgaaatcagacagctcttgcattgactgtgggtcttagcacctttcagtgtgatctgcaaagaaaaacctactgtccttcctaattaggaagaaacggagcgtgttagagtctctactcagagatcctggcaaggagtggaactattacatggcggactcttttcactctcaagttgaaagcttgttatgctgaatacatagactagaaataaggtacctcggttcttacctggccacattaattggcactctcgttctgaatatgaacaatcttagctgatgacatcctggcagacaccattgtcttccttcagaaagtacagactgtgagtggggtttaaaaaatattctagctcagggtgacccaggtctcaagtctgaggactctgacatgcgtggtatgtgtcttgcatcattctttgcagttaattcttttagggttcaaacgtggtgggagtcagggccaggcagggttccagctagctttacttttaaaagtataattgaaatcaccaactgctccctgatacctctgctcccctggtgccagaagaatgctgttgagctgttcattgtagcccaggaggtgccacctgagaggccgcacagtggttgtgctgcaggctggtcctcagggccattaccatggttacagtgtaccaccccgaaggtgagaacccttcagaatgatggaatgcctgagatgacatccagagtacatttgccttgcgatcagttttgctgtgcattaaacactgtcgcagggaacttggttttggtgaacttcagttgcataaggaggtcttaccattcatcctctaaattttggcattaaattatgagtgcaaatcattttgctgataaagcttatatgttattgttgaatattagcacattggatactagaatgaaatattagataactaaatgcattgtcctgagtacactttacaaatatgtatacatatatgtgggtgtgtatacgggtgtgtgcatcttatacatgtatacctgtgtgttcataccccatgaacttttcccttttctccatgttgtcacattttaaagcagttaaagcatttaaagcattttaaagcagttaagcatttaaagcagtttaggtcagccaaaccttgatgtgggggaagttaattactcttttgaaatctccagtgagattttaggtttttcacgggtgttccagggagtcttgaaagaagccatgaataaactaaacagtgggggcacagaggagaccctcccctctgctctgctgtcgtggatggaggagaagcactccctgttgcggagaaagcagtgagcactagtgatgatggaggtggttcaatattgtcctcttttctcctgcagcttagtcatccagtggagatttgtgaacagggtccagaagcagatgaacgccttcttggaggtaagccatgctggccagggttctctgccatgtgcctctggtcccgggtcgatgggggatcgcgcttctcctttagctagtgtggtggagctgatcaganacagaggcgaggctggggaccctgcaggaagaccgggatcgcacagctcacaccgctggccagtctccagcacaagagtgttcagccaccgtgccgccacctccttttccttttcacgggttctcctgcttgacttctcttatttttacatttgtcctgtttttaaagaggacgttttacagacttgatctagaaccattgtcttggagtttcaggcggtacccaagagaaggctgccttttgctgcagtgacaggttccaagaagcccgagggctcagagctgaatgatgaagcgcagtccccaaagtgcctggccacccctccctccctggatcactgctgcctgggcttgattgattgattgattgattgattgattgattttgagagagattctcactgtcacccaggctggagtacagtggtgcgatctcggctcactgcagcctctgcctcccgggttcaagcaattctcctgcctcagcctcccaagtagctgggactacaggcacgcgccaccacacccagctaatttttgtatttttagtagagacggggtttcaccatgttggccaggatggtcttgatctcctgacctcatgatccacccgccccggcctcccaaagtgctgggattacaggcatgagccgccgcgcccagccatggacatttttttttaatcccctgccctttttctttgtggcataattcattgcaggttctcttctatacagatacatggaaaacacattttcttaagctgagtttttatttattttatacccagccacctcatgacagcttttaccctgttacagagcaaagtgggcactgcccagatcgaacttttaatatcagggatgctcccaggcccctagcagtgggtgagggattcatcattttaaacagtattccacttggaccaaaagcaaaattctttcttaaatatgatatagtattagttacctcaaagatcacacaggaaacagcctcgtgtccacgtgactgattttctctgcactgaggcagagctctcgtggggtgatgctttcccttcactcaggtacctacacaggatgcgtgaaagcccgggcagcacactcagaaacagctcggggccttagggacttaaaatgggaggacagaatggcaggtttcactctttatttagataagaaatcccaggaagcagattcctgggccccaccgcaggcggtccacaccttcagaaacgcggcgttcgcagcgcgcagggcccagcagagctgagctcatcctagatcacgccacagttagtggtacctgggaactggagcatggttttctgtacgcacagtgtctgcacccatcacctgcctccctctgtgtttcttctccctgcctccagcacgttatttttaagcgtgtctcttacacatctgtagcctgtgcatcttaggacgcactgactcacagcagtgttataaatggcttttggaatccaccctgcctacagtatcccatattttcatcaggtttcagaaattactccactacttgaatcttctagattctatgctttttcgaaactgttatattgtgactgtgctgtttttactggaactatagttacttgatactgtcactgacataggaatcatcaggagagattatatttttttctggctaaccagaaaagtttgtttttcctgtgaaattttttttttttgaaggcaataggtgtttaagatgttttttttttttctttcagggattcacagaactacttcctattgatttgattaaaatttttgatgaaaatgagctggaggtttgtattataaacattattttatgtaaagtggattttttaaagtatctctcattactttacaagtaatattttaatattcttggatccataatgtcctagagagtaactttagatgaattatattacatgtctcttatagggcttatttgccaatgtggttctattacatgtctcttatggggcttgtttgccaatgtaggagtaaggaacagcaaaaataatcagctgtagttgccttgtccatcagagggcagttctggaacatgcctagtaagtagaggccactgagcagagctgggatcatggccctatgcaccaggcgaggcaaattgccacaacaagtagaaacaaggtttgcagtagccctctggacagcagaaacctgcttacactaccagactggccaagtatcctctgctgcatccccatccacccccaccgtggcagccaaatgggggtcttggccacaaggtggccgtaagcatctacttgggcctgtagaacgacgtctcattgaacttgaagtggtttatgttgagtgaggaaaaatgtcagaaggcaacagggttgtagcaaaaggtagtttagtgattgtctagttcagcttcttggtgttgacatagttgagtaacagccattttaaaaacaaaggaatatctcgccctttgttgtgtcgagagaaacaggggaaagactgtctgttgagaagccgttggtgggactcggccatttgccccgtccatagccagtgagtgtttcccatacactggccttctatacttttatctcaaaacagaaagttcaagatcgatgatgtctatagaaatcatatacctcaagcctttcctctgataggtgggaaactgaggcagagagcagctgggtttacccagcaaggttttggcacggtcaggcctaggaactttatttccaggcttctggcttagttctgtttccatttcattctggtacctttgcataaatatcttccatttgtccacaggaaacctcccctgatggagagttgcataataggaacggcaaaccttagactaaatgctaagtcgaagacccagttgtgccttagcgtatgtctgccattcttaggcctctgggcagatgaggtgatttgtcatcactggaattgatcaacctggaggagagtcataagcactaattcttttgtgggtagggagatgcttttagatattcagaggaataacctctcaggaggagaagcagccagggtaatgcacagatgctgctggagcgtgagagaatccacaggtcccatgcgtaagactagaggggtagggaggacgactgtggcatttttatatccgatacgacatgccgtggcttgcgcaaggttcgaattgagctgccctcgtgactgctgcctctgtgatctgctatggcaggtggagcctggaacaggtgtctgccttcctctgttgttatgatttgctagcttaccttcgcggcacagtgaccacatgctggcactgagggtggtcatttctcagtgtgtgatctcgcacctttcacatcctgcttttacatctggtaaattttcttcctagttgctcatgtgcggcctcggtgatgtggatgtgaatgactggagacagcattctatttacaagaacggctactgcccaaaccaccccgtcattcagtggttctggaaggtaactccggggcccagccccagccggtgtcctccacctgaggcaggattgagggctgtgtggcgccctccattgtgntctgacttcaggactgatgctggctttggggtctgttagagcttggactgctgggggagggaagaggcaaactgagccagcagccccgtggtggctcctctgtaactgtagcagacagctagacttgaatgaagttggtccctacaaaagcacactggccttccttgaccacctcgtgaaagtgacttttatttgagggactggtcctccaatgcgtaaatagaaatggggggcttctcagggcagaaacaggcttcagggatggctttgcaagatgccactttctgttaagaagtcgttttctcaatttttaaaatatattccaacaaatattttgatctgtgtatctttcaaccaaagataacacaacatttgatttattatcttagggccactgtttgtatcctgttcagcttaggagggaagtaaaataggaatgggttagtccaaaggagatatagtaaacaaacttaaaaaaaaaaaaacagttatcccccaaaaaggctgattatttacttcaccccaaaaaggaatcatttaactttttcaaatttatttttatttatttatttatttattttaaagatggggtctcactgtgttgcccaggctggattcaaattcttgggcttaagcaatcctcctacctcggcccctcaaagtgctgggattacaggcatgagccaccatgcccggcctttttcacatttctaaatgccttttattactatttcaaatgccagcaggaatacagagataaaaaagcaaaatcttcaaagcctagtccaggtctcacttggcttgttttagatgtttgcctacagcagtccaagtggcattaccagtaaagccacctggattcccataataatgcagatatgtaagatacacagattattttagaaccccatctttgcctttgttgttttgtttttgttttgttttgttttgtttcattttataaaatgatgtcttctagggaacgtgtctacaatctgaaatcccatctcataacctggcttccccttgtgatgacaaatcttaaatactgtatatttataattggcttagggggaactggtaagcctcgaacacagaaacatgagcttggtgccatcagagagtttgctttttatatcatttattttggcctattggcagaagaagaaagagacggacattgtgatcactcagtctcttagattagagaggccagctagtattgtggccataaaaaacctactcagttttcagagtcaactgtctaggtcttacattgcaatataaataagattaagttctgcctgcctgcatgacagcagcatgtgccatgggtcacgtggggggtataatgaccttctgcctctgttcataggctgtgctactcatggacgccgaaaagcgtatccggttactgcagtttgtcacagggacatcgcgagtacctatgaatggatttgccgaactttatggtgagcaggataccattggattcagttgtcctcctgggaatttccagccaggcatgaactctggcccaagaaccctgccgccaggcctctgcagaaggctaagtttcaggacagtgtgccatgcataggttccatgaaagttcaatgaaagtactgttatctatactttatatagataacatggtgcttctacttcgagggattggggggcagtttgtgaagaggtccataaggctgctcttttttttttttcctagtttagttttttagtaaatcgttaaaaactaggttttgtagggtcatttatatggtcgtaaactgaggtataaagtcacctccagtaggcagaatttttcagtgtttaccatagatttaaaaatcactctgtactttgcatactgaaagtcacatttcattcaccctcccacccacaaaactagtttgaagtttaaatttccagggcccagctgagaggctgtagctgcctgcctttccacgtaactgttgtgtttgttaatcttggtgcagttccattctggagactaagcagagtctttctgtgaggttgtgcagacctctggcttccctcaacattaaatatcaatgttgcagcagaagagagtgtcttgggcctcacccctgggggcaaaccctgccctgacagtagctggactgcagaccacaccatagcttcattcttctgccccaagcaatcttaacatttctttttcttttcttgtctaggttccaatggtcctcagctgtttacaatagagcaatggggcagtcctgagaaactgcccagagctcacacatggtgagtgacaaaaacacatgcatgtcaatgcaatatctgaactgcttagctgggtatggtgctgggctcaaggctattgaatgctctgtttcctgtctgtaagtagcttagagaattaaaggacagtgatgtggatgaaaatagaaattgtacagtagtgctaataagacataatgcactcagtatgtttggcacataaagggctcaggcctccctgctgtggggaatttctcctctgagcccagtccttccctcattattctaggtagtggagctttcactgttcagcatacatagataaggcagctctcaacctgtataataaacacgttgggtttttactccaaccttaaattggttgagaagttaggacaaaataccctgtagaaacatcctttttcaaaggccttctatgcccatgaataacctgtaattccctggaattgagcagtaacatgactgtggtcggaggagggtaagagggctgacacgtggccagggatgcccaagcgtggagcgtggctgccctcagaaggccctctcaggaggcacagtgacgcagaagggtcccagttgttttctgaacagttgcatgaaacccagcacaaatgcagactggatgggatcagtttcttgaagccgggttcagggagctcttgctaactcaaactcccatgtccctcgtgttggtttttctgcaaaggcctttatttcttgctcctgaggaagcagcagaagtgggccttctggaaaacggtgagcagcgtagccctgtgtttctcatgcagcgggggctgcaaagcctgctctggccatagtgagctaacataagcaaccaaacactccctgcaggaaacgccctcccttacactagaagtgctggccaggagagaattctcatgaacatgtgtttgcgaaaaattggctgtgaaaggtttttcacttctgtcggattcccttgcctcaccagaaaggtgttttttttttctattcgtaccattcacgtgactctccagatggaaacaatgtggtcattgcctgtcagagccttgaaagcaagctgactccagcctaaaattcatgaatattcagagcagtcattgtccgtggttctctggctttattctaagggaagaatgtttgagtagttcagagcttttatccaaatggtgtccaagtcatatgtggttttctgggttctactggcctccatatgaaggcaccagcgttgagccaagccccaggactgtgggtggtgatgcgaaactcaagctcataatactaaccaggatgaagattaggaaaagcgaaattattgggcacagtcatcatctgtggtcaggcactgcttaatctttatggcagccttatgagatatgttattcccttgggctgtcagaaggctggcccagggctcaccagagtcacagattcccagatcacaggatttgaactcagagctaccagaattagagcctgcaccctttaccactacaccagatacactgcctctgttgatatacccactttctttttagacttttccaaggaaaccaaattagtgaaccaatttcatgttcattcagcccatgtttctctgtgacttcagggacacatatcttactattgaactgtcttttttatttcggagcccacatgattctgccacaagtagaacttcccagataagacctctgaactcagtggttctcaacctcagctgcatgttggaaccatctagagagccttaaagaaatcactgatgcctggaatttggacttcattggtctggtgtgtgacccaggcagtgggattttcaaagctccccagatgatttttataggctggcagggttgaaaattcacagctcttccctaggaagggcaaagatccacctacaggaagggaacaacccagctggctcttaccagaacttattttcctctttatgtgtcacggaaataaagcaactgtgtagttttcctaatgatgttctccccagactaacttgacccggatggagaggactggcagttgcaagcaacactggctagcatgagtgggactgttctgctgtttcttctaaatggctttcctccctacctgaccctgactgtattttgacataggaaacagaaacttcactggctgtttcgtggcaacagttctgccataaaattttgccatacataggtttaatttcttccacgttttatgatacacaattaaagttcagaataaaaatctgatttcctagaagagcagaagctgaaggatctggttctctgtgatgagggtacctttcattaagctttccaatggtgattattgagtgtctgacattcaaaggacttcatttcattgttctataaaaggtcactactcagacatttaaaattactcttcattaagaatcacaggcccacctgcccttttaggtagactctaaagcaaacaaaaatcatctcgttcagcccatgcatcttccacgtgaggacgctgaagccctgtgaggacaatgagctccttaaagtcacccagctcattagtgcagagcaaagccaggtccgtgtgtcctgacctctgaaatgataggaactcacactcaccaagcactctgttcattccggggatggtgctcagcacttgatgcgattgactcataccatcatcacagtggccctaagaggtgggtgatgttatgacccacttttttacagataacactgggatgcaaagcggtgaagcattaagcagcatgattcagaacctcagatcttgacatcccgtctttgcctctctcttcatcatgccagtgtttctcaaacctgaataatctgtgcaccttttttaaagggaaaaaatggtcacagattctcaagaatgggcctgagacccccatagggattgcaggcccgggactgtgaaaccccagctgaaaagcctgaagccactttcggtgaaaggctcttttaaatgccatctgtagatgtgaagtcctgtctttattaatatgataatagaaagttaaaagcctgtattagtacttgctcttttaggattcctgggttcctgagaaccccagtttgagaagcacagtgttattctctgtcttttagtgtttagtggctgttagagaatccaagtggaactcagtgggacttattcaatatttagtggttgttaaacggccctctacggtatgtgtttcttttctgttgctgtgacaacggttagcttttagtatatgtgcaagtgctgccaaagcgagcacgtgaatggttagcttttaaaacccaagaagttactttgctcattcttggaatcacacatcaatacctggagggggcggttttaaacacagtttgagcactcgcggcagaggcagcacaagtgcacttcaagagctgggctttggagcaccccagggctgtacctggccccgtgtgaccttgggcaagttacctaaccttgctgtgtctcaagctcctcctctgtgaaataggggtgaagcattagctgccttacaaagtgattgccagggttcataacattgagacaaggctgatggggcatggtgagcactccatgaacatgagctcttacgtcataatgagctgtggcaagtgtgcatgccattttcatgacagatacacatcagcaatcaccccccaacacatacacacacacacagaggtgcaggttctgtggctaaaggctctggtcttgagccccatgtagacatacagtaaatgttgaaaggtgttaacactgataccatctcttgagtaattgagcccttgctgtatgccgggcccactgatccgatccacttggcactcatatgtgcagtttccccatgtcacagaagcacagaggccatccatttgtctgaaaaccctcactattgccagggcgatttgcagcccccgcccccacctgaagcctccagatatgtagggactttttctaaatgcaactttacatagcaaatgtcaattttgcctgactttgatcagaggaggtagcttagcactggtgttcccgagccccggacagcctgggttctgtttgtgggtctgccgtttgacaaagactgtgacctcaggaaccttgccctatgtctctgctccaggagctcctgtgcagaatggagataacatgacctgcttcatagggttgtgatgaaaatgaagtgagttaatagggagaaaagcacttggcttgaggcctagtgtggaataagtaatagtattagagatagacacagtcttaattcgtgggtaactccaaaagcatcagctctgtgttccaagggtttggaaatcttgccggttactcccttcccaccaggattcctccgagatctgcatctgactatagcaaaggtttcatggaccatttgaaaatgttctttctctgtaaattacaagagcttatttagtgtggatgtttcatagctagaggtttttggggtttttttctccaggtaatcaaaattgttggttaaggcttttttattctcttactcaaacctcatgccctattaaccagatcgaggaagtgctgttgtggcttttcacctacactttttgttccttttgcagctttaatcgccttgacttacctccatatgaaacctttgaagatttacgagagaaacttctcatggccgtggaaaatgctcaaggatttgaaggggtggattaagcaccctgtgcctcgggggtggttgttcttcaagcaagttctgcttgcacttttgcatttgcctaacagacttttgcagaggcgatggcagagagcagctgcaggcatggtccctggagccgagccttcaccacgcactcgtccaagttcggatgcgggaacctggtcccagcttgagttcctgcctttcccaccacaaattatcaactggttgatgtgtacactaattacatttcaggaggacttaatgctatttatgttgtgcctctgcaggcaaagcccttaataaatattttacatcctttctaatgacaatgaanggaattaatcactcaacaggtatagtattacgactcatgtttactttttaaaatgatttagaccgattttcagattttatttcgttatgattaaagatgtctcatgtacttggaaaagtgagcattttttttttttttgtatttcactttcataccaggcttaatgtcaatgacatttttatttttgaagtactctgacacctccaccctctactttattagaattggaaggcaaatttttgtccaaaaacctacagacaagtactttgagagaatttccaatataatattagacataatgataattttttccatactcagaatgaaaaactggatattacgtttttgttttggggtttttttgtacaaatttagctaatagctacaggctgagagaattgtaacatagcatgacaaattttgtgttgacttgaaaggaatcacaccattattccttagaagtaattacatgtgttctaacacatttgagacagggttggactcccatttctcatccgagaaattacttaacccttcctggcgctgtacagtcatcttttattctatttcctctttgctgtttgtagtagagacattttgaatgaaacttggcactgcttgattcaaaactgtggaaaccagatctgtttagtctcctgtttgtatgcgtttgctaatggtagctaaataaccagtttttgttgtaaatgcaccaattctgaaggcactttatgtactacatggaggtcatatctggttttgtttttatttttttatcatgaacattaaatgtgatgatgatttcttttccctgcacacatctttccggtgcaatatctatcaattgtgaatctggctgctggtgtataaaaacctggatgtaaagctgagcctacagacctgtcctcaccaactgttttgtgatttctactcaactacaaagatttatttaatgtactcttaatctaactgagttttgttaccaatgacctgttgcatgcttcaataccgtgtactgcctgagttgtgcctcttgtgtgctagattaaaagtgagacagagacttgacttgatcctctgagctcaagctattgagctggtagtggcagaggactgagggtacctgcacagtttgattcttttccacgtgtaagtctccattgcagaattgtcgtgctttgagaaaacacctgaggcagtgtgggagttgaacgaccctgctgtcctttttaacctgtgttgtcctagaccctgtcggggcagtcaggggacactagagatttgatctcatgcgagtcatcaataggacaaaaaagttgtggtttggggaggtctgtttgttacataaaaaggacctttcggtgtaagaaattgccgtttttaccctgccctggctggcatgtgagaagccatggaaggttgtggttgtaaatgagttgtctaaaggggtgcagaggcctgaggtttctaaaagaaggtagatttctacagagctgagtgttggttcctttttcttattggttgaaaattacctggtagtgatcagaaaacttagatgctatgtaactaaaaaaaaaaaaaaaaaaaaaaaaaaaaaaaaaaaaattcccgctcatgagttttgactattggtgagatgttttccgctacagttaacatgacaaatgtctcagtggcaaaaatcccctttttgtaagcccccatagtctagaggcagttttctttttaagaatcatgccagagcctgagtcgagcagtatgctttcttggtttttgagagtaattgtgtaattgtagagggagaaatccaattctaacctaagaactgggattcttctgtcatcttgtaaaccgtatattgaaaaaaacagaatgtcactaaatgcatattaagtcaagtattggaaagtataaaagaaaaatcattctgacaatttctaagccagaagcaaacaagaattactgaaatctaccccatgaatacttggaaggcagtaattgtgagtgacacctcagttcatcaaccccttaataatatcagcttaattttaatgacaactaaatatgctgaagtgaggatttagtattttttaaaaaagcaaaacaaggttcagtagtcctcagcaattctccaagtttctctctttgcctaaaatggtcatagatcttgatttctctgaatcgtgatgaccacacccagtcatcttcacagcataattgcaggtggcagtaaagagagtgtgctgggtaaggagcagttgctgggtcattccttgggccccgacctgcccggggagtagccctgggggagagagggcagtgttgcctatcccagaggtcccagcagtcacactgctctgcaggccgggctctctttatagccagagaaatcaccttaatgcagtctctttagttgtctgctgaagctgtagttattatgggccacttacatgaggctgagaagtacgtgccggagctcacacactgcctgttgcggttctcttaacatcagttatcacagctgcctgtgggtcccgggtatttccattcctgccccttgttggcccgaggaaggatgtggaaagagcacctggtgggatgaaggtccaacagcctgtgcctctccactgctggccctggagccggcagcagtgaggcattcattgtctgtgttgcggtgtattcccagcttcagtgctcttttcctttttgcctgaaatgtttatgcttctctgcagccagtcctctaacaaatctcaagaacaaaggtaagacacttggtttttgtttccaggacccttcagaaggtgacatcagatattccctaaattcagacaatgagggatacagagcgacttggcatgtattatttctcccatgtaaggacaaagggacagattattattgttatttctgagacagagtcttgctctgtagctcaggctggagtgcagtggctcaatctcagctcaccacaacctctgcctcctggcttcaagcgattcttctgcctcagcctccccgaatagttgggattacaggcacccaccaccacgcctggctaatttttgtatttttagtagagatggtttcaccatgctggccaggctggtcttgaactcctgacctcaggtgatcctcccgcctcagccttccaaagtgctgggattacaagcatgagccaccgcacccggcctcacagtgacagattctgagaaacagcatgcaaaacatttgaaccattttctacatctcccattgttgcatagagagtgtgcaccgctgctatcttgccagatccacactggtcctcccgaaagccaggttcatacacagcaactttttaattattctaacagttacccattaacagtcgactcctgtatttctgagagtcttgtactcacctctgaaatttaaaaacgtataaagagagcctgggttaatcagttctgcagcccctacgtgacactgtgctagttctccttcttctgtctcctccttaccctggccctgcacccctgtacttaagagggagaggtgggaggtgctgtctggtatcatttgctgcctcgccagtagagggtgccgctgtgcagggtaactgcccgcctgctcccttcctgacctcccctgaccccgaagatcactacctctgtcattcaggcattggggtacatcctgataagtcgtgtcagaactgccaatttcaggactgagatgtgtttttaaaaaacaaatccttataaactccactttgtactttagattttaaaactggggaaaaatgtgatattctttggaccacttttttaatttatataagccttaatgaacagtgtctatacatttgcatacacacacccccaccccagagtgttctcagtatgtcagagaaagtgccacagcattaggacgggagcttggagaacgttttctagaaaagggttagcttcctgttggcatgaaattttccaagcaaacctcattaaacatctgttgtttgttaaagatgttccactgaaagcaacgcatgtttcaaaggcacgtctttccgttcgttggttttctgtgtgtaaggagtagcattgctgttggcgcctaacctcgcgtgcactgcattctcaaccccgtaccagtgcatcatcagaagccttcctcgtgaccataactctgtgtctgcagatatgtgttcccgtgtaagccagttttccccttttactcagactgatttcacctagattgtcacggtttccttcatgttaactttgcgtgactttgttcttcctttactactctgtatgtaatatatatacatatatacgtacatatgctgtccaaatatatttgtatatatttgtatagcatttttacacctttattgagtaatctggtttcgaaaggaggtgagagtttagtcccttctgcagttttctccaagctgtgtcctgtgaatttcaacccttggagcctaagaaaaccctaggaagatgatgttaatttgctgtcatttcctaattcaggatctatcatcaaatgaaacatgaaaaaaacagtgacttttaaggtgaaaagagtttcaagcattccaaataaattatcaatgtttcataactttttattataaacccacctcctaataggaagccaagtactatttgatacagtggtaaaaaccaaactaccttgaatttttttaaggcaacttatgaataatgctcattttcacagtcagaatagctttaaaatatggttgaatttgatacacacaggaagttttcttgaagaacaatcctttcgcttttcttttttcttgagagatctaaagagaaactgtagattgttttcctgacagcaaaagactaatgtgacaaaatgaagtcattgtaaagaagcgatgcaacttgtcaaatatttaataaagaattatggaagctggaacattttctacatcaagtgttatgggttgtttgatttaaagcttctttgtgaatgcaccatcttaattgttgtcagaggggtttaaatgcctgcagatttatagtatgttcatttccttcatctccctaaaagcgccgcacttttaaaaacattaaagtctggcagggcacagtggctcacgcctgtaatcccagcactttgggaggctgaggtgggcagatcactgaggttaggcattcaagaccagcctgaccaacatggtgaaaccccatctctactaaaaatacaaaaaatatatatatatattagccagacgtggtggcgcatgcctgtaatgccagctactcaggaggctgaggcaggagaatcgcttgaacccgggaggcagaggtttcagtgagctgagattgtgccattgcatgcactccagcctgggtgacagagcgagattccgtttcaaaaaaaaaaaaaaagtctgcccaaaacacatggcttaagcctactaaaaggatgcacatttattcttatccgtctgctgttttgttcttttattaaacttgagaattactgattttacgtaacatttgtataatccatgttagtctgttcctcaaaaggcatccttgtatacctagccctcaacttgtgtgagagttaataagactcaataatgaatccccaagttgcttctcagaaaggtgctgtcagaatcccgaccgtgtgtcactgccctgtgcaaagccggtggcatttttcctcatgccatttcattccgctcagatcatctcagactcctggagaattttccctttttctttagtactgagcttcctcttgatgtgcttaacccatcccctcggggcagaggagatagctagcggggaagcaggacatcatttagtctttggtttcttgcggcttgtctttttccattaacagtagatggcatcttgccagaaagctgtccgcagcacttggaattcctgcctcctcctccagggttatgagtacacatgagaggcacaattggacagagtcactgtgaatatttatatgttctttcttaaaaccacacatggtggaacgaattacatcaatgacacagttgctagattaatacgcttttaacctgctctgaagtccaagactcattaggcacttgtgagatggtgaagcccctggtaaaagtgtttgcggtgagcatgggtatcctgaattctgacactagctttctcggggttggctctcagagccatgttcaaaggggttcctgaggtaagaacgcagaagcctctttctgggagagaacacttctcaaaacagcttccagagagctcaggctgtagaa

SEQ ID NO: 2 - DNA, 20 bp, Artificial Sequence
  Description of Artificial Sequence: Primer
tccgagcagagctcatgtaa

SEQ ID NO: 3 - DNA, 20 bp, Artificial Sequence
  Description of Artificial Sequence: Primer
agaggcatcgaagtacacgc

SEQ ID NO: 4 - DNA, 20 bp, Artificial Sequence
  Description of Artificial Sequence: Primer
ggccagcaagagagatagga

SEQ ID NO: 5 - DNA, 20 bp, Artificial Sequence
  Description of Artificial Sequence: Primer
aggttgcagtgagccaagat

SEQ ID NO: 6 - DNA, 21 bp, Artificial Sequence
  Description of Artificial Sequence: Primer
gctgccataacaaaataccca

SEQ ID NO: 7 - DNA, 20 bp, Artificial Sequence
  Description of Artificial Sequence: Primer
tctagcccctggaatgtgac

SEQ ID NO: 8 - DNA, 20 bp, Artificial Sequence
  Description of Artificial Sequence: Primer
atattggattagggcccacc

SEQ ID NO: 9 - DNA, 20 bp, Artificial Sequence
  Description of Artificial Sequence: Primer
tatgaacctgccacctggac

SEQ ID NO: 10 - DNA, 20 bp, Artificial Sequence
  Description of Artificial Sequence: Primer
gaaagtggcagagaggaagc

SEQ ID NO: 11 - DNA, 22 bp, Artificial Sequence
  Description of Artificial Sequence: Primer
agatgaattaacagctccagca

SEQ ID NO: 12 - DNA, 20 bp, Artificial Sequence
  Description of Artificial Sequence: Primer
gaggagagttccagccactg

SEQ ID NO: 13 - DNA, 24 bp, Artificial Sequence
  Description of Artificial Sequence: Primer
tggcaggagtaattgatcttaatg

SEQ ID NO: 14 - DNA, 20 bp, Artificial Sequence
  Description of Artificial Sequence: Primer
tgacttcacggtcaagcaag

SEQ ID NO: 15 - DNA, 20 bp, Artificial Sequence
  Description of Artificial Sequence: Primer
agagccatagtcccacactg

SEQ ID NO: 16 - DNA, 21 bp, Artificial Sequence
  Description of Artificial Sequence: Primer
gcctgctttcttcacttctga

SEQ ID NO: 17 - DNA, 20 bp, Artificial Sequence
  Description of Artificial Sequence: Primer
ggtgttgttttgttgcaagg

SEQ ID NO: 18 - DNA, 19 bp, Artificial Sequence
  Description of Artificial Sequence: Primer
gactgcaccaccctgaaga

SEQ ID NO: 19 - DNA, 20 bp, Artificial Sequence
  Description of Artificial Sequence: Primer
aaatgttttcactgtgccgc

SEQ ID NO: 20 - DNA, 20 bp, Artificial Sequence
  Description of Artificial Sequence: Primer
ggctgagggtgtccatagaa

SEQ ID NO: 21 - DNA, 26 bp, Artificial Sequence
  Description of Artificial Sequence: Primer
tgtaaagtctgaacaaaatctgtgtg

SEQ ID NO: 22 - DNA, 24 bp, Artificial Sequence
  Description of Artificial Sequence: Primer
catggagataggcaaattaagaca

SEQ ID NO: 23 - DNA, 20 bp, Artificial Sequence
  Description of Artificial Sequence: Primer
gctgaggcaggagaatcact

SEQ ID NO: 24 - DNA, 21 bp, Artificial Sequence
  Description of Artificial Sequence: Primer
tggaggctttattgaagatgc

SEQ ID NO: 25 - DNA, 26 bp, Artificial Sequence
  Description of Artificial Sequence: Primer
cttggtagaataatcatatcaatgct

SEQ ID NO: 26 - DNA, 20 bp, Artificial Sequence
  Description of Artificial Sequence: Primer
gcttttcagtcctccacagg

SEQ ID NO: 27 - DNA, 26 bp, Artificial Sequence
  Description of Artificial Sequence: Primer
cgtctcatagaattaaaccattctca

SEQ ID NO: 28 - DNA, 21 bp, Artificial Sequence
  Description of Artificial Sequence: Primer
gagctgatagatgctgttggc

SEQ ID NO: 29 - DNA, 23 bp, Artificial Sequence
  Description of Artificial Sequence: Primer
tctacagtcatgagaatgccttg

SEQ ID NO: 30 - DNA, 26 bp, Artificial Sequence
  Description of Artificial Sequence: Primer
tgcactgaattatagtgtcacttctg

SEQ ID NO: 31 - DNA, 20 bp, Artificial Sequence
  Description of Artificial Sequence: Primer
gcctaccgttctgtattccc

SEQ ID NO: 32 - DNA, 20 bp, Artificial Sequence
  Description of Artificial Sequence: Primer
ggcagcgtgattaggtctgt

SEQ ID NO: 33 - DNA, 18 bp, Artificial Sequence
  Description of Artificial Sequence: Primer
cagctgtgccctcaaacc

SEQ ID NO: 34 - DNA, 20 bp, Artificial Sequence
  Description of Artificial Sequence: Primer
aagaccaggtgctgctcact

SEQ ID NO: 35 - DNA, 20 bp, Artificial Sequence
  Description of Artificial Sequence: Primer
gcctgagtgaaggaggtgtc

SEQ ID NO: 36 - DNA, 20 bp, Artificial Sequence
  Description of Artificial Sequence: Primer
aaacccggtgtggatagtga

SEQ ID NO: 37 - DNA, 20 bp, Artificial Sequence
  Description of Artificial Sequence: Primer
cgtggactgtcaggtaccaa

SEQ ID NO: 38 - DNA, 22 bp, Artificial Sequence
  Description of Artificial Sequence: Primer
tcagctcatattgaaaacagca

SEQ ID NO: 39 - DNA, 23 bp, Artificial Sequence
  Description of Artificial Sequence: Primer
tctaaagagaaatctctccgagg

SEQ ID NO: 40 - DNA, 20 bp, Artificial Sequence
  Description of Artificial Sequence: Primer
gtgtcaccgactgtgcagat

SEQ ID NO: 41 - DNA, 20 bp, Artificial Sequence
  Description of Artificial Sequence: Primer
gtgactcaaaggcaatcgct

SEQ ID NO: 42 - DNA, 18 bp, Artificial Sequence
  Description of Artificial Sequence: Primer
gttcttcagaccccggct

SEQ ID NO: 43 - DNA, 19 bp, Artificial Sequence
  Description of Artificial Sequence: Primer
gcaaatgggcagaggactt

SEQ ID NO: 44 - DNA, 20 bp, Artificial Sequence
  Description of Artificial Sequence: Primer
ttggatgagccacttaagca

SEQ ID NO: 45 - DNA, 24 bp, Artificial Sequence
  Description of Artificial Sequence: Primer
ccacctatacttgtcaaatacggc

SEQ ID NO: 46 - DNA, 20 bp, Artificial Sequence
  Description of Artificial Sequence: Primer
tgattcacatcatggcccta

SEQ ID NO: 47 - DNA, 25 bp, Artificial Sequence
  Description of Artificial Sequence: Primer
ccaagaaagtgttagtggtataagg

SEQ ID NO: 48 - DNA, 20 bp, Artificial Sequence
  Description of Artificial Sequence: Primer
tcaaggggaagaacatgagc

SEQ ID NO: 49 - DNA, 22 bp, Artificial Sequence
  Description of Artificial Sequence: Primer
ttctgaaagttttggtctcctc

SEQ ID NO: 50 - DNA, 20 bp, Artificial Sequence
  Description of Artificial Sequence: Primer
tgtaaggcaggtgacgtgag

SEQ ID NO: 51 - DNA, 23 bp, Artificial Sequence
  Description of Artificial Sequence: Primer
tcaaagtacagatcactggagca

SEQ ID NO: 52 - DNA, 20 bp, Artificial Sequence
  Description of Artificial Sequence: Primer
tggaaactggtgattcctcc

SEQ ID NO: 53 - DNA, 20 bp, Artificial Sequence
  Description of Artificial Sequence: Primer
tacccaggtcaaggatgagc

SEQ ID NO: 54 - DNA, 20 bp, Artificial Sequence
  Description of Artificial Sequence: Primer
atgcaattcctgtggcttct

SEQ ID NO: 55 - DNA, 20 bp, Artificial Sequence
  Description of Artificial Sequence: Primer
tgcacttaaccaaagcctga

SEQ ID NO: 56 - DNA, 20 bp, Artificial Sequence
  Description of Artificial Sequence: Primer
ccaagctgtgttcaccttca

SEQ ID NO: 57 - DNA, 19 bp, Artificial Sequence
  Description of Artificial Sequence: Primer
ggcagcaaccctttacgtt

SEQ ID NO: 58 - DNA, 20 bp, Artificial Sequence
  Description of Artificial Sequence: Primer
actttgtgagacgggatcaa

SEQ ID NO: 59 - DNA, 20 bp, Artificial Sequence
  Description of Artificial Sequence: Primer
ggcagggaagaagctacaca

SEQ ID NO: 60 - DNA, 20 bp, Artificial Sequence
  Description of Artificial Sequence: Primer
tggaaactggtgattcctcc

SEQ ID NO: 61 - DNA, 20 bp, Artificial Sequence
  Description of Artificial Sequence: Primer
atgcaattcctgtggcttct

SEQ ID NO: 62 - DNA, 22 bp, Artificial Sequence
  Description of Artificial Sequence: Primer
ctgagtagctaccaaaggatgg

SEQ ID NO: 63 - DNA, 20 bp, Artificial Sequence
  Description of Artificial Sequence: Primer
gagcttcccaggagaaaagg

SEQ ID NO: 64 - DNA, 20 bp, Artificial Sequence
  Description of Artificial Sequence: Primer
agtcagctcctggactctgg

SEQ ID NO: 65 - DNA, 20 bp, Artificial Sequence
  Description of Artificial Sequence: Primer
cactgctgggactctcttcc

SEQ ID NO: 66 - DNA, 20 bp, Artificial Sequence
  Description of Artificial Sequence: Primer
atgaagaacatggcacctcc

SEQ ID NO: 67 - DNA, 21 bp, Artificial Sequence
  Description of Artificial Sequence: Primer
gccacttaaattgtcacctgc

SEQ ID NO: 68 - DNA, 20 bp, Artificial Sequence
  Description of Artificial Sequence: Primer
ttttgagctagcagcccatt

SEQ ID NO: 69 - DNA, 23 bp, Artificial Sequence
  Description of Artificial Sequence: Primer
gcactgttcacagatttttgact

SEQ ID NO: 70 - DNA, 23 bp, Artificial Sequence
  Description of Artificial Sequence: Primer
tgcacattaactcacttggaaga

SEQ ID NO: 71 - DNA, 24 bp, Artificial Sequence
  Description of Artificial Sequence: Primer
aaatccttaaaagaacaggggttt

SEQ ID NO: 72 - DNA, 20 bp, Artificial Sequence
  Description of Artificial Sequence: Primer
gatggaagaaccaatggtgg

SEQ ID NO: 73 - DNA, 20 bp, Artificial Sequence
  Description of Artificial Sequence: Primer
aggaagggagggaattttga

SEQ ID NO: 74 - DNA, 20 bp, Artificial Sequence
  Description of Artificial Sequence: Primer
tcaattcctgagccctcaac

SEQ ID NO: 75 - DNA, 23 bp, Artificial Sequence
  Description of Artificial Sequence: Primer
caccctgactcatattctgacaa

SEQ ID NO: 76 - DNA, 20 bp, Artificial Sequence
  Description of Artificial Sequence: Primer
agcctggcaatgatgaaatc

SEQ ID NO: 77 - DNA, 26 bp, Artificial Sequence
  Description of Artificial Sequence: Primer
ttgtgactagggttctgaattatttt

SEQ ID NO: 78 - DNA, 18 bp, Artificial Sequence
  Description of Artificial Sequence: Primer
catcgctagtggatgccg

SEQ ID NO: 79 - DNA, 22 bp, Artificial Sequence
  Description of Artificial Sequence: Primer
ccatgaacccaatagacaagaa

SEQ ID NO: 80 - DNA, 21 bp, Artificial Sequence
  Description of Artificial Sequence: Primer
atttggctgaaccatatgaaa

SEQ ID NO: 81 - DNA, 23 bp, Artificial Sequence
  Description of Artificial Sequence: Primer
cttcgtaggtcaaaaacagtcaa

SEQ ID NO: 82 - DNA, 20 bp, Artificial Sequence
  Description of Artificial Sequence: Primer
catggttccaggaaatgtga

SEQ ID NO: 83 - DNA, 25 bp, Artificial Sequence
  Description of Artificial Sequence: Primer
ttgctttcactaaagttattccaga

SEQ ID NO: 84 - DNA, 17 bp, Artificial Sequence
  Description of Artificial Sequence: Primer
tctggcctgctacccgc

SEQ ID NO: 85 - DNA, 23 bp, Artificial Sequence
  Description of Artificial Sequence: Primer
agatcaatgaacttttcaagcaa

SEQ ID NO: 86 - DNA, 20 bp, Artificial Sequence
  Description of Artificial Sequence: Primer
actgctggtttgccagtcat

SEQ ID NO: 87 - DNA, 22 bp, Artificial Sequence
  Description of Artificial Sequence: Primer
ttttgtagaccagtatggcagc

SEQ ID NO: 88 - DNA, 19 bp, Artificial Sequence
  Description of Artificial Sequence: Primer
gtgacacctgcatccacag

SEQ ID NO: 89 - DNA, 20 bp, Artificial Sequence
  Description of Artificial Sequence: Primer
aaccgaggcacaaatgaaac

SEQ ID NO: 90 - DNA, 21 bp, Artificial Sequence
  Description of Artificial Sequence: Primer
tttctggagtcttgatgggtg

SEQ ID NO: 91 - DNA, 25 bp, Artificial Sequence
  Description of Artificial Sequence: Primer
gtttcctgataaatgaatagcagag

SEQ ID NO: 92 - DNA, 18 bp, Artificial Sequence
  Description of Artificial Sequence: Primer
gggactgcgcttcatcat

SEQ ID NO: 93 - DNA, 26 bp, Artificial Sequence
  Description of Artificial Sequence: Primer
tcttagttgatatccacatattccaa

SEQ ID NO: 94 - DNA, 24 bp, Artificial Sequence
  Description of Artificial Sequence: Primer
aaagcattttaaagcagttaagca

SEQ ID NO: 95 - DNA, 20 bp, Artificial Sequence
  Description of Artificial Sequence: Primer
gtaccgcctgaaactccaag

SEQ ID NO: 96 - DNA, 20 bp, Artificial Sequence
  Description of Artificial Sequence: Primer
cactgcccagatcgaacttt

SEQ ID NO: 97 - DNA, 21 bp, Artificial Sequence
  Description of Artificial Sequence: Primer
gcactgactcacagcagtgtt

SEQ ID NO: 98 - DNA, 24 bp, Artificial Sequence
  Description of Artificial Sequence: Primer
cacagatcaaaatatttgttggaa

SEQ ID NO: 99 - DNA, 19 bp, Artificial Sequence
  Description of Artificial Sequence: Primer
cagctctgctcagtggcct

SEQ ID NO: 100 - DNA, 20 bp, Artificial Sequence
  Description of Artificial Sequence: Primer
ctagaggggtagggaggacg

SEQ ID NO: 101 - DNA, 20 bp, Artificial Sequence
  Description of Artificial Sequence: Primer
ggaggaccagtccctcaaat

SEQ ID NO: 102 - DNA, 22 bp, Artificial Sequence
  Description of Artificial Sequence: Primer
attatcttagggccactgtttg

SEQ ID NO: 103 - DNA, 20 bp, Artificial Sequence
  Description of Artificial Sequence: Primer
tggtgccatcagagagtttg

SEQ ID NO: 104 - DNA, 20 bp, Artificial Sequence
  Description of Artificial Sequence: Primer
tgacttggacaccatttgga

SEQ ID NO: 105 - DNA, 23 bp, Artificial Sequence
  Description of Artificial Sequence: Primer
cgaccatataaatgaccctacaa

SEQ ID NO: 106 - DNA, 18 bp, Artificial Sequence
  Description of Artificial Sequence: Primer
gcccagctgagaggctgt

SEQ ID NO: 107 - DNA, 21 bp, Artificial Sequence
  Description of Artificial Sequence: Primer
caggttgagagctgccttatc

SEQ ID NO: 108 - DNA, 20 bp, Artificial Sequence
  Description of Artificial Sequence: Primer
attgagcccttgctgtatgc

SEQ ID NO: 109 - DNA, 21 bp, Artificial Sequence
  Description of Artificial Sequence: Primer
ctccgagatctgcatctgact

SEQ ID NO: 110 - DNA, 22 bp, Artificial Sequence
  Description of Artificial Sequence: Primer
caagatgacagaagaatcccag

SEQ ID NO: 111 - DNA, 25 bp, Artificial Sequence
  Description of Artificial Sequence: Primer
ttaattccattcattgtcattagaa

SEQ ID NO: 112 - DNA, 20 bp, Artificial Sequence
  Description of Artificial Sequence: Primer
acctggtcccagcttgagtt

SEQ ID NO: 113 - DNA, 20 bp, Artificial Sequence
  Description of Artificial Sequence: Primer
tcggatgagaaatgggagtc

SEQ ID NO: 114 - DNA, 24 bp, Artificial Sequence
  Description of Artificial Sequence: Primer
ccatactcagaatgaaaaactgga

SEQ ID NO: 115 - DNA, 20 bp, Artificial Sequence
  Description of Artificial Sequence: Primer
tgaagcatgcaacaggtcat

SEQ ID NO: 116 - DNA, 20 bp, Artificial Sequence
  Description of Artificial Sequence: Primer
tcaattgtgaatctggctgc

SEQ ID NO: 117 - DNA, 22 bp, Artificial Sequence
  Description of Artificial Sequence: Primer
gaaaaaggaaccaacactcagc

SEQ ID NO: 118 - DNA, 20 bp, Artificial Sequence
  Description of Artificial Sequence: Primer
aagttgtggtttggggaggt

SEQ ID NO: 119 - DNA, 23 bp, Artificial Sequence
  Description of Artificial Sequence: Primer
ggttagaattggatttctccctc

SEQ ID NO: 120 - DNA, 25 bp, Artificial Sequence
  Description of Artificial Sequence: Primer
ccatttccagagaggaacaaccgtg

SEQ ID NO: 121 - DNA, 20 bp, Artificial Sequence
  Description of Artificial Sequence: Primer
gcgccggctccatggcgacc

SEQ ID NO: 122 - DNA, 25 bp, Artificial Sequence
  Description of Artificial Sequence: Primer
agcaagttctctattctcatccgct

SEQ ID NO: 123 - DNA, 25 bp, Artificial Sequence
  Description of Artificial Sequence: Primer
ctggctccaaagatgtcctttttgg

SEQ ID NO: 124 - DNA, 22 bp, Artificial Sequence
  Description of Artificial Sequence: Primer
cgagatcaattccagaaacaac

SEQ ID NO: 125 - DNA, 21 bp, Artificial Sequence
  Description of Artificial Sequence: Primer
gagtgggaggtgccgtgctgg

SEQ ID NO: 126 - DNA, 21 bp, Artificial Sequence
  Description of Artificial Sequence: Primer
ggaagagctcgtctgaagtgg

SEQ ID NO: 127 - DNA, 21 bp, Artificial Sequence
  Description of Artificial Sequence: Primer
gctgctggaaatctaccttgg

SEQ ID NO: 128 - DNA, 21 bp, Artificial Sequence
  Description of Artificial Sequence: Primer
ggctggaaagtgttcagctgg

SEQ ID NO: 129 - DNA, 25 bp, Artificial Sequence
  Description of Artificial Sequence: Primer
ccgctacgtacaatgaaagtttcac

SEQ ID NO: 130 - DNA, 25 bp, Artificial Sequence
  Description of Artificial Sequence: Primer
agcaagttctctattctcatccgct

SEQ ID NO: 131 - DNA, 85 bp, Homo sapiens
cagtgatccgtatgtgaaactttcattgtacgtagcggatgagaatagagaacttgctttggtccagacaaaaacaattaaaaag

SEQ ID NO: 132 - DNA, 39 bp, Homo sapiens
atgagacgtctcgcatttgagcargtaacactcggtaag

SEQ ID NO: 133 - DNA, 49 bp, Homo sapiens
cacagggagagtcccgtattctcagagtaaaagttgtttctggaattga

SEQ ID NO: 134 - DNA, 24 bp, Homo sapiens
  CDS (1)..(24)
atgagacgtctcgcatttgagcag

SEQ ID NO: 135 - protein, 8 aa, Homo sapiens
MRRLAFEQ

SEQ ID NO: 136 - DNA, 45 bp, Homo sapiens
  CDS (1)..(45)
ggagagtcccgtattctcagagtaaaagttgtttctggaattgay

SEQ ID NO: 137 - protein, 15 aa, Homo sapiens
GESRILRVKVVSGID

SEQ ID NO: 138 - DNA, 78 bp, Homo sapiens
  CDS (1)..(75)
atgagacgtctcgcatttgagcargtaacactcgggagagtcccgtattctcagagtaaaagttgtttctggaattga

SEQ ID NO: 139 - protein, 25 aa, Homo sapiens
MRRLAFEQVTLGRVPYSQSKSCFWN

SEQ ID NO: 140 - protein, 98 aa, Artificial Sequence
  Description of Artificial Sequence: SMART C2 consensus sequence
TLTVKIISARNLPPKDKGGKSDFYVKVSLDGDPREKKKTKVVKNTLNPVWNETFEFEVPPPELSELEIEVYDKDRFSRDDFIGRVTIPLSDLLLGGRH

SEQ ID NO: 141 - protein, 101 aa, Homo sapiens
ILRVKVVSGIDLAKKDIFGASDPYVKLSLYVADENRELALVQTKTIKKTLNPKWNEEFYFRVNPSNHRLLFEVFDENRLTRDDFLGQVDVPLSHLPTEDPT

SEQ ID NO: 142 - protein, 101 aa, Homo sapiens
IVRVRVIAGIGLAKKDILGASDPYVRVTLYDPMNGVLTSVQTKTIKKSLNPKWNEEILFRVHPQQHRLLFEVFDENRLTRDDFLGQVDVPLYPLPTENPRM

SEQ ID NO: 143 - protein, 102 aa, Homo sapiens
ILRVKVVSGIDLAKKDIFGASDPYVKLSLYVADENRELALVQTKTIKKTLNPKWNEEFYFRVNPSNHRLLFEVFDENRLTRDDFLGQVDVPLSHLPTEDPTM

SEQ ID NO: 144 - protein, 102 aa, Mus musculus; identical to SEQ ID NO: 143

SEQ ID NO: 145 - protein, 102 aa, Gallus gallus
ILRVKVVSGIDLAKKDIFGASDPYVKLSLYVADENRELALVQTKTIKKTLNPKWNEEFYFRVNPTNHRLLFEVFDENRLTRDDFLGQVDVPLSHLPTEDPSM

SEQ ID NO: 146 - protein, 102 aa, Xenopus sp.
ILRVKIVSGTDLAKKDIFGASDPYVKLSLYVADENRELALVQTKTIKKTLNPKWNEEFFFRVHPTNHRLLFEVFDENRLTRDDFLGQVDVPLNHLPTEDPTM

SEQ ID NO: 147 - protein, 102 aa, Fugu rubripes
VLRVKVIAGIDLAKKDIIGASDPYVKLSLYVADENRELALVQTKTIKKTLNPKWNEEFFFRVSPSNHRLLFEVFDENRLVRDDFLGQVDVPLSHLPTEDPTM

SEQ ID NO: 148 - protein, 24 aa, Homo sapiens
MRRLAFEQGESRILRVKVVSGIDL

SEQ ID NO: 149 - protein, 32 aa, Homo sapiens
MATGLGEPVYGLSEDEGESRILRVKVVSGIDL

SEQ ID NO: 150 - protein, 31 aa, Fugu rubripes
MAATYEPIYGLSEDEHETRVLRVKVIAGIDL

SEQ ID NO: 151 - protein, 29 aa, Xenopus sp.
MAAEPIYGLSEDDEESRILRVKIVSGTDL

SEQ ID NO: 152 - DNA, 701 bp, Homo sapiens
gagtcacagaggaagccatttccagagaggaacaaccgtgtagactgctttcctgggagtcaagttaaaacttctctcctgtgaccttgtcacccggcagtggaaagttacccttggctgcagccacgacttccgcatactcttcagaacttgctctgcccttgagttttccagctttcctttaatgcactaaacctttaatattgtattctcctaaatgagacgtctcgcatttgagcaggtaacactcgggagagtcccgtattctcagagtaaaagttgtttctggaattgatctcgccaaaaaggacatctttggagccagtgatccgtatgtgaaactttcattgtacgtagcggatgagaatagagaacttgctttggtccagacaaaaaaaaaaaaaaaaaaaaaaaaaaaaacttgttttgcgcgccggccttggcgccctcgaaagaggttttcaaacccattctctgtgggcgccgcggcgggccccagtatggttattgtaacactggccgcataaggtgttccctagagagaaacccgggccacatgaattgggccttggggctctccaccaaatataaaacagcgccggggggaacaccggtgttctggacaaccccagatgggtgcggagagcactaaggggctctttcaacggagtcaagcaagttagatatcgcggccgtgggga

SEQ ID NO: 153 - DNA, 827 bp, Homo sapiens
  modified_base (554): a, t, c or g
  modified_base (677): a, t, c or g
gagtcacagaggaagccatttccagagaggaacaaccgtgtagactgctttcctgggagtcaagttaaaacttctctcctgtgaccttgtcacccggcagtggaaagttacccttggctgcagccacgacttccgcatactcttcagaacttgctctgcccttgagttttccagctttcctttaatgcactaaacctttaatatgtattctcctaaatgagacgtctcgcatttgagcagggagagtcccgtattctcagagtaaaagtggtttctggaattgatctcgccaaaaaggacatctttggagccagtgatccgtatgtgaaactttcattgtacgtagcggatgagaatagagaacttgctttggtccagacaaaaacaattaaaaagacactgaacccaaaatggaatgaagaattttatttcagggtaaacccatctaatcacagactcctatttgaagtatttgacgaaaatagactgacacgagacgacttcctgggccaggtggacgtgccccttagtcaccttccgacagaagatccaancatggagcgacctatacatttaaggacttttctcctcagaaccagaagtcataagtctcgagttaacggatttgcgaatgaaatggcctatatgctaaaaaaaaaaaaaaaaaaaacttttgncggggcccgggccgaaagttttaaacctccgttggggcgcggcccatgttggaaacggcagcgggtccagaacccgcggcgcggtgggttccccaaaaacccgggccggtttaacaaccggggtcgggccggctcaaaggccggctaccg

SEQ ID NO: 154 - DNA, 4879 bp, Homo sapiens
gcccgggtgggtggctgcgcagggccctacctgggcgggagcggctgcagagccctgtccacgcggtgcctccccagcacggcacctcccactccaggctgttggttacctggccgggagctggcagagaccaggatttctcctcgccgccgttgctgttgttaggggaaacagaccatctgcatctagacctgcctctctctccgctccccacttcagacgagctcttcctgcctggaatctgtgatccgtatgtgaaactttcattgtacgtagcggatgagaatagagaacttgctttggtccagacaaaaacaattaaaaagacactgaacccaaaatggaatgaagaattttatttcagggtaaacccatctaatcacagactcctatttgaagtatttgacgaaaatagactgacacgagacgacttcctgggccaggtggacgtgccccttagtcaccttccgacagaagatccaaccatggagcgaccctatacatttaaggactttctcctcagaccaagaagtcataagtctcgagttaagggatttttgcgattgaaaatggcctatatgccaaaaaatggaggtcaagatgaagaaaacagtgaccagagggatgacatggagcatggatgggaagttgttgactcaaatgactcggcttctcagcaccaagaggaacttcctcctcctcctctgcctcccgggtgggaagaaaaagtggacaatttaggccgaacttactatgtcaaccacaacaaccggaccactcagtggcacagaccaagcctgatggacgtgtcctcggagtcggacaataacatcagacagatcaaccaggaggcagcacaccggcgcttccgctcccgcaggcacatcagcgaagacttggagcccgagccctcggagggcggggatgtccccgagccttgggagaccatttcagaggaagtgaatatcgctggagactctctcggtctggctctgcccccaccaccggcctccccaggatctcggaccagccctcaggagctgtcagaggaactaagcagaaggcttcagatcactccagactccaatggggaacagttcagctctttgattcaaagagaaccctcctcaaggttgaggtcatgcagtgtcaccgacgcagttgcagaacagggccatctaccaccgccatcagtggcctatgtacataccacgccgggtctgccttcaggctgggaagaaagaaaagatgctaaggggcgcacatactatgtcaatcataacaatcgaaccacaacttggactcgacctatcatgcagcttgcagaagatggtgcgtccggatcagccacaaacagtaacaaccatctaatcgagcctcagatccgccggcctcgtagcctcagctcgccaacagtaactttatctgccccgctggagggtgccaaggactcacccgtacgtcgggctgtgaaagacaccctttccaacccacagtccccacagccatcaccttacaactcccccaaaccacaacacaaagtcacacagagcttcttgccacccggctgggaaatgaggatagcgccaaacggccggcccttcttcattgatcataacacaaagactacaacctgggaagatccacgtttgaaatttccagtacatatgcggtcaaagacatctttaaaccccaatgaccttggcccccttcctcctggctgggaagaaagaattcacttggatggccgaacgttttatattgatcataatagcaaaattactcagtgggaagacccaagactgcagaacccagctattactggtccggctgtcccttactccagagaatttaagcagaaatatgactacttcaggaagaaattaaagaaacctgctgatatccccaataggtttgaaatgaaacttcacagaaataacatatttgaagagtcctatcggagaattatgtccgtgaaaagaccagatgtcctaaaagctagactgtggattgagtttgaatcagagaaaggtcttgactatgggggtgtggccagagaatggttcttcttactgtccaaagagatgttcaacccctactacggcctctttgagtactctgccacggacaactacacccttcagatcaaccctaattcaggcctctgtaatgaggatcatttgtcctacttcacttttattggaagagttgctggtctggccgtatttcatgggaagctcttagatggtttcttcattagaccattttacaagatgatgttgggaaagcagataaccctgaatgacatggaatctgtggatagtgaatattacaactctttgaaatggatcctggagaatgaccctactgagctggacctcatgttctgcatagacgaagaaaactttggacagacatatcaagtggatttgaagcccaatgggtcagaaataatggtcacaaatgaaaacaaaagggaatatatcgacttagtcatccagtggagatttgtgaacagggtccagaagcagatgaacgccttcttggagggattcacagaactacttcctattgatttgattaaaatttttgacgaaaatgagctggagttgctcatgtgcggcctcggtgatgtggatgtgaatgactggagacagcattctatttacaagaacggctactgcccaaaccaccccgtcattcagtggttctggaaggctgtgctactcatggacgccgaaaagcgtatccggttactgcagtttgtcacagggacatcgcgagtacctatgaatggatttgccgaactttatggttccaatggtcctcagctgtttacaatagagcaatggggcagtcctgagaaactgcccagagctcacacatgctttaatcgccttgacttacctccatatgaaacctttgaagatttacgagagaaacttctcatggccgtggaaaatgctcaaggatttgaaggggtggattaagcaccctgtgcctcgggggtggttgttcttcaagcaagttctgcttgcacttttgcatttgcctaacagacttttgcagaggcgatggcagagagcagctgcaggcatggtccctggagccgagccttcaccacgcactcgtccaagttcggatgcgggaacctggtcccagcttgagttcctgcctttcccaccacaaattatcaactggttgatgtgtacactaattacatttcaggaggacttaatgctatttatgttgtgcctctgcaggcaaagcccttaataaatattttacatcctttctaatgacaatgaatggaattaatcactcaacaggtatagtattacgactcatgtttactttttaaaatgatttagaccgattttcagattttatttcgttatgattaaagatgtctcatgtacttggaaaagtgagcatttttttttttttttgtatttcactttcataccaggcttaatgtcaatgacatttttatttttgaagtactctgacacctccaccctctactttattagaattggaaggcaaatttttgtccaaaaacctacagacaagtactttgagagaatttccaatataatattagacataatgataattttttccatactcagaatgaaaaactggatattacgtttttgttttggggtttttttgtacaaatttagctaatagctacaggctgagagaattgtaacatagcatgacaaattttgtgttgacttgaaaggaatcacaccattattccttagaagtaattacatgtgttctaacacatttgagacagggttggactcccatttctcatccgagaaattacttaacccttcctggcgctgtacagtcatcttttattctatttcctctttgctgtttgtagtagagacattttgaatgaaacttggcactgcttgattcaaaactgtggaaaccagatctgtttagtctcctgtttgtatgcgtttgctaatggtagctaaataaccagtttttgttgtaaatgcaccaattctgaaggcactttatgtactacatggaggtcatatctggttttgtttttatttttttatcatgaacattaaatgtgatgatgatttcttttccctgcacacatctttccggtgcaatatctatcaattgtgaatctggctgctggtgtataaaaacctggatgtaaagctgagcctacagacctgtcctcaccaactgttttgtgatttctactcaactacaaagatttatttaatgtactcttaatctaactgagttttgttaccaatgacctgttgcatgcttcaataccgtgtactgcctgagttgtgcctcttgtgtgctagattaaaagtgagacagagacttgacttgatcctctgagctcaagctattgagctggtagtggcagaggactgagggtacctgcacagtttgattcttttccacgtgtaagtctccattgcagaattgtcgtgctttgagaaaacacctgaggcagtgtgggagttgaacgaccctgctgtcctttttaacctgtgttgtcctagaccctgtcggggcagtcaggggacactagagatttgatctcatgcgagtcatcaataggacaaaaaagttgtggtttggggaggtctgtttgttacataaaaaggacctttcggtgtaagaaattgccgtttttaccctgccctggctggcatgtgagaagccatggaaggttgtggttgtaaatgagttgtctaaaggggtgcagaggcctgaggtttctaaaagaaggtagatttctacagagctgagtgttggttcctttttcttattggttgaaaattacctggtagtgatcagaaaacttagatgctatgtaact

SEQ ID NO: 155 - DNA, 829 bp, Mus musculus
  modified_base (645): a, t, c or g
  modified_base (722): a, t, c or g
gtttggctgcagggcagcattacagagcttgagttgttccctaggtctctggaatccaccaagttccgcctatagtgtttggccaggctgcctctgggatgagctgtttctgtcttccccacgtttgaattcgctcacgctttgagacaggcaggcatcagcaacagcagtttttagcccagacagctctcagcaccgtcagctcagcacagcttcagagggctctgcctggtgggaagctctgcagggctctacctgggcagtagctacagagccctcccctctcagcaccttgctccgcccactcgttccaggctgtcgattgccggtagggaaactggagagaccaggattcctcttccattcttgctgttgttaaggaaaacagaccaaccatctgcatctagaccagccttcctctccctcgctcccttttagaggaggttttcctgcctggaatctgcgacccatacgtgaagctgtccttgtatgtagctgatgagaatagagaacttgctctggttcaaaccaagacaattaaagaagcctgctgatattccaaacaggtttgaaatgaaacttcacagaaacaacatatttgaagagtcctatcggaggatcatgtctgtaaagagacctgacgtnctaaaggctaggctgtggattgagtttgaatcagagaaaggcctggactatgggggcgtggccagagaatgttcttnctactgtcccaagagatgtttaacccctactatggcctcttcgagtactctgccacggacaactacacacttcagatcaaatcccactcaggccctctgtatgaaga

SEQ ID NO: 156 - DNA, 825 bp, Mus musculus
tcagctcagcacagcttcagagggctctgcctggtgggatagctctgcagggctctacctgggcagtagctacagagccctcccctctcagcaccttgctccgcccactcgttccaggctgtcgattgccggtagggaaactggagagaccaggattcctcttccattcttgctgttgttaaggaaaacagaccaaccatctgcatctagaccagccttcctctccctcgctcccttttagaggaggttttcctgcctggaatctgcgacccatacgtgaagctgtccttgtatgtagctgatgagaatagagaacttgctctggttcaaaccaagacaattaaaaagacgctgaacccaaagtggaatgaagagttttattttaggggtaaatccatctaatcacaggctcctatttgaagtatttgacgagaacagattgacacgagacgacttcctgggccaggtggacgtgcctcttagtcaccttccgacagaagatccaaccatggagagaccctatacatttaaggattttctcctgcgacctagaagtcataaatctcgagtcaaggggttttgaggttgaaaatggcctacatgccgaaaaacggaggtcaggatgaagaaaacagcgagcagagtggatgacatggagcatggatgggaagtggttgactccaacgactcagcttcccagcaccaggaggagctcccccctcctcccctggcgccaggactgggacgagacacgtggacactttagggccgaactttaactatgtcaaccaacaacaaccggaagttactcagtggcaccgacca

SEQ ID NO: 157 - DNA, 584 bp, Mus musculus
ggattgccggtagggaaactggagagaccaggattcctcttccattcttgctgttgttaaggaaaacagaccaaccatctgcatctagaccagccttcctctccctcgctcccttttagaggaggttttcctgcctggaatctgcgacccatacgtgaagctgtccttgtatgtagctgatgagaatagagaacttgctctggttcaaaccaagacaattaaaaagacgctgaacccaaagtggaatgaagagttttattttagggtaaatccatctaatcacaggctcctatttgaagtatttgacgagaacagattgacacgagacgacttcctgggccaggtggacgtgcctcttagtcaccttccgacagaagatccaaccatggagagaccctatacatttaaggattttctcctgcgacctagaagtcataaatctcgagtcaaggggtttttgaggttgaaaatggcctacatgccgaaaaacggaggtcaggatgaagaaaacagcgagcagagggatgacatggagcatggatgggaagtggttgactccaacgactcaacttcccagcaccagg

SEQ ID NO: 158 - DNA, 220 bp, Mus musculus
aactggagagaccaggattcctcttccattcttgctgttgttaaggaaaacagaccaaccatctgcatctagaccagccttcctctccctcgctcccttttagaggaggttttcctgcctggaatctgcgacccatacgtgaagctgtccttgtatgtagctgatgagaatagagaacttgctcttgggttcaaaccaagacaattaaaaagacgctgac

SEQ ID NO: 159 - DNA, 617 bp, Mus musculus
aactggagagagcaggattcctcttccattcttgctgtggttaaggaaaacagaccaaccatctgcatctagaccagccttcctctccctcgctcccttttagaggaggttttcctgcctggaatctgcgacccatacgtgaagctgtccttgtatgtagctgatgagaatagagaacttgctctggttcaaaccaagacaattaaaaagacgctgaacccaaagtggaatgaagagttttattttagggtaaatccatctaatcacaggctcctatttgaagtatttgacgagaacagattgacacgagacgacttcctgggccaggtggacgtgcctcttagtcaccttccgacagaagatccaaccatgagagagaccctatacatttaaggattttctcctgcgacctagaagtcataaatctcgagtcaaggggttttctgaggtctgaaaatggcctacatgccgaaaaacggaggtcaggatgaacgaaaacagcgagcagagggatgacatggagcatggatgggaagtggttgactccaacgactcagcttcccagcaccaggaggagctcccccctcctcccctgccgcaggatgggaagagaaagg

SEQ ID NO: 160 - DNA, 500 bp, Mus musculus
  modified_base (49): a, t, c or g
  modified_base (456): a, t, c or g
aggcctactggcattcttgctgttgttaaggaaaacagaccaaccatcngcatctagaccagccttcctgtccctggctcctttttagaggaggttttcctgcctggaatctgcgacccatacgtgaagctgtccttgtatgtagctgatgagaatagagaacttgctctggttcaaaccaagacaattaaaaagacgctgaacccaaagtggaatgaagagttttattttagggtaaatccatctaatcacaggctcctatttgaagtatttgacgagaacagattgacacgagacgacttcctgggccaggtggacgtgcctcttagtcaccttccgacagaagatccaaccatggagagaccctatacatttaaggattttctcctgcgacctagcaagtcataaatcttcgagtcaaggggttttttgaggtttgaaaatggctctacatgnccgaaaaacgggaggtccaggatggaagaaaaaccagcgagcag

SEQ ID NO: 161 - DNA, 454 bp, Mus musculus
gattcttgctgttgttaaggaaaacagaccaaccatctgcatctagaccagccttcctctccctcgctcccttttagaggaggttttcctgcctggaatctgcgacccatacgtgaagctgtccttgtatgtagctgatgagaatagagaacttgctctggttcaaaccaagagaattaaaaagacgctgaagccaaagtggaatgaagagttttattttagggtaaatccatctaatcacaggctcctatttgaagtatttgacgagaacagattgacacgagacgacttcctgggccaggtggacctgcctcttagtcaccttccgacagaagatccaaccatggagagacctatacatttaaggattttctcctgcgacctacaagtcataaatctcgagtcaaggggttttgaggttgaaaatggcctacatgccgaaaaacggaggtta

SEQ ID NO: 162 - DNA, 710 bp, Mus musculus
  modified_base (594): a, t, c or g
ttcttgctgttgttaaggaaaacagaccaaccatctgcatctagaccagccttcctctccctcgctcccttttagaggaggttttcctgcctggaatctgcgacccatacgtgaagctgtccttgtatgtagctgatgagaatagagaacttgctctggttcaaaccaagacaattaaaaagacgctgaacccaaagtggaatgaagagttttattttagggtaaatccatctaatcacaggctcctatttgaagtatttgacgagaacagattgacacgagacgacttcctgggccaggtggacgtgcctcttagtcaccttccgacagaagatccaaccatggagagaccctatacatttaaggattttctcctgcgacctagaagtcataaatctcgagtcaaggggtttttgaggttgaaaatgggctacatgccgaaaaacggaggtcaggatgaagaaaacagcgagcagagggatgacatggagcatggatgggaagtggttgactccaacgactcagcttcccagcaccaggaggagctcccccctcctcccctgccgccaggatgggaagagaaagtggacaatntaggccgaacttactatgtcaaccacaacaacaggagtactcagtggcaccgacccagcttgatggatgtgtcctcggaatcagacaataacatcaggcagatcaaccaggaggct

SEQ ID NO: 163 - DNA, 530 bp, Mus musculus
ttcttgctgttgttaaggaaaacagaccaaccatctgcatctagaccagccctcctctccctcgctcccttttagaggaggttttcctgcctggaatctgcgacccatacgtgaagctgtccttgtatgtagctgatgagaatagagaacttgctctggttcaaaccaagacaattaaaaagacgctgaacccaaagtggaatgaagagttttattttagggtaaatccatctaatcacaggctcctatttgaagtatttgacgagaacagattgacacgagacgacttcctgggccaggtggacgtgcctcttagtcaccttccgacagaagatccaaccatggagagaccctatacatttaaggattttctcctgcgacctagaagtcataaatctcgagtcaaggggtttttgaggttgaaaatggcctacatgccgaaaaacggaggtcaggatgaagaaaacagcgagcagagttatgacattgagcatggatgtgaagtgggtgactccatcgactcatcttcc

SEQ ID NO: 164 - DNA, 500 bp, Mus musculus
ttattgctgcggttaaggaaaacagaccaaccatctgcatctagaccagcctttctctccctcgctcccttttagaggaggggttcctttctggaatctgcgacccatacgtgaagctgtccttgtatgtagctgatgagaatagagaacttgctctggttcaaaccaagacaattaaaaagacgctgaacccaaagtggaatgaagagttttattttagggtaaatccatctaatcacaggctcctatttgaagtatttgacgagaacagattgacacgagacgacttcctgggccaggtggacgtgcctcttagtcaccttccgacagaagatccaaccatggagagaccctatacatttaaggattttctcctgcgacctagaagtcataaatctcgagtcaaggggtttttgaggttgaaaatggcctacatgccgaaaaacggaggtcaggatgaagaaaacagcgagcagagggatgacatggagcatggatgg

SEQ ID NO: 165 - DNA, 520 bp, Mus musculus
cacgcgtccgggaaaacagaccaaccatctgcatctagaccagccttcctctccctcgctcccttttagaggaggttttcctgcctggaatctgcgacccatacgtgaagctgtccttgtatgtagctgatgagaatagagaacttgctctggttcaaaccaagacaattaaaaagacgctgaacccaaagtggaatgaagagttttattttagggtaaatccatctaatcacaggctcctatttgaagtatttgacgagaacagattgacacgagacgacttcctgggccaggtggacgtgcctcttagtcaccttccgacagaagatccaaccatggagagaccctatacatttaaggattttctcctgcgacctagaagtcataaatctcgagtcaaggggtttttgaggttgaaaatggcctacatgccgaaaaacggaggtcaggatgaagaaaacagcgagcagagggatgacatggagcatggatgggaagtggttgactccaacgactcagc

SEQ ID NO: 166 - DNA, 712 bp, Mus musculus
ggaaaacagaccaaccatctgcatctagaccagccttcctctccctcgctcccttttagaggaggttttcctgcctggaatctgcgacccatacgtgaagctgtccttgtatgtagctgatgagaatagagaacttgctctggttcaaaccaagacaattaaagaagacgctgaacccaaagtggaatgaagagttttattttagggtaaatccatctaatcacaggctcctatttgaagtatttgacgagaacagattgacacgagacgacttcctgggccaggtggacgtgcctcttagtcaccttccgacagaagatccaaccatggagagaccctatacatttaaggattttctcctgcgacctagaagtcataaatctcgagtcaaggggtttagaggttgaaaatggcctacatgccgaaaaacggaggtcaggatgaagaaaacagcgagcagagggatgacatggagcatggatgggaagtggttgactccaacgactcagcttcccagcaccaggaggagctcccccctcctccccctgccgccaggatgggaagagaaagtggacaatttaggccgaacttactatgtcaaccacaacaacaggagtactcagtggcaccgacccagcttgatggatgtgtcctcggaatcagacaataacatcaggcagatcaaccaggaggctgcacaccgacgcttccg

SEQ ID NO: 167 - DNA, 605 bp, Mus musculus
ggaaaacagagcaaccactctgcatctagaccagccttcctctccctcgctcccttttagaggaggttttcctgcctggaatctgcgacccatacgtgaagctgtccttgtatgtagctgatgagaatagagaacttgctctggttcaaaccaagacaattaaaaagacgctgaacccaaagtggaatgaagagttttattttagggtaaatccatctaatcacaggctcctatttgaagtatttgacgagaacagattgacacgagacgacttcctgggccaggtggacgtgcctcttagtcaccttccgacagaagatccaaccatggagagaccctatacatttaacggattttctcctgcgacctagaagtcataaatctcgagtcaaggggtttttgaggttgaaaatggcctacatgccgaaaaacggaggtcaggatgaagaaaacagcgagcagagggatgacatggagcatggatgggaagtggttgactccaacgactcagcttcccagcaccaggaggagctcccccctcctcccctgccgccaggatgggaagagaaagtggacaatttaggccgaacttactatgtcaacca

SEQ ID NO: 168 - DNA, 870 bp, Mus musculus
aaccatctgcatctagaccagacttcctctccctcgctcccttttagaggaggttttcctgcctggaatctgcgacccatacgtgaagctgtccttgtatgtagctgatgagaatagagaacttgctctggttcaaaccaagacaattaaaaagacgctgaacccaaagtggaatgaagagttttattttagggtaaatccatctaatcacaggctcctatttgaagtatttgacgagaacagattgacacgagacgacttcctgggccaggtggacgtgcctcttagtcaccttccgacagaagatccaaccatggagagaccctatacatttaaggattttctcctgcgacctagaagtcataaatctcgagtcaaggggttttgaggttgaaaatggcctacatgccgaaaaacggaggtcaggatgaagaaaacagcgagcagagggatgacatggagcatggatgggaagtggttgactccaaacgactcagcttcccagcaccaggaggagctcccccctcctcccctgccgccaggatgggaagagaaagtggaccaatttaggccgaacttactatgtcaaccacaacaacaggagtactcagtggcaccgacccagcttgatggatgtgtcctcggaatcagacaataacatcaggcagatcaaccaggagggctgcacaccgacgcttccgctctcggaggcacataagtgaagatttggagcctgaggcctctgaaggcggtggagaggcctgagccttgggagaccatttcaagaggaaaatgagcttggcaggagcattctctcagctggctctgcccccaaccagcttgctcacccaatgttccgggacccagccc

SEQ ID NO: 169 - DNA, 962 bp, Mus musculus
ctctccctcgcgtcccttttagaggaggttttcctgcctggaatctgcgacccatacgtgaagctgtccttgtatgtagctgatgagaatagagaacttgctctggttcaaaccaagacaattaaaaagacgctgaacccaaagtggaatgaagagttttattgttagggtaaatccatctaatcacaggctcctatttgaagtatttgacgagaacagattgacacgagacgacttcctgggccaggtggacgtgcctcttagtcaccttccgacagaagatccaaccatggagagaccctatacatttaaggattttctcctgcgacctagaagtcataaatctcgagtcaaggggttttgaggttgaaaatggcctacatgccgaaaaacggaggtcaggatgaagaaaacagcgagcagagggatgacatggagcatggatgggaagtggttgactccaacgactcagcttcccagcaccaggaggagctcccccctcctcccctgccgccaggatgggaagagaaagtggacaatttaggccgaacttactatgtcaaccacaacaacaggagtactcagtggcaccgacccagcttgatggatgtgtcctcggaatcagacaataacatcaggcagatcaaccaggaggctgcacaccgacgcttccgctctcggaggcacaattagtgaagatttggagcctgaggcctctgaaggcggtggagaaggccctggagcccatgagaagaccactattcagacgggaaatgaacacatgggcagggagaattctcctcagacctgggtctggcccccaccggactgcactaccccaaggggtcccgggacccgagccccaaagaaacggcgacgaagaaagtgtaccgcgaagggtgcgcaaaaacaccgccggaaaccacaagggggaaggggaaaagatcaagaaaacggaagag

SEQ ID NO: 170 - DNA, 3270 bp, Mus musculus
caccctcctctggggacttcttccctgccagccgcctgcccacctgtgggaactgggcagagccagtcttctgtgctcgttcctgggtggtacaggcgaggtcgaactacaaatgccagagaagacagcagctacaagctgccctccagaggacccacagcgacccatacgtgaagctgtccttgtatgtagctgatgagaatagagaacttgctctggttcaaaccaagacaattaaaaagacgctgaacccaaagtggaatgaagagttttattttagggtaaatccatctaatcacaggctcctatttgaagtatttgacgagaacagattgacacgagacgacttcctgggccaggtggacgtgcctcttagtcaccttccgaagatccaaccatggagagaccctatacatttaaggattttctcctgcgacctagaagtcataaatctcgagtcaaggggtttttgagattgaaaatggcctacatgccgaaaaacggaggtcaggatgaagaaaacagcgagcagagggatgacatggagcatggatgggaagtggttgactccaacgactcagcttcccagcaccaggaggagctcccccctcctcccctgccgccaggatgggaagagaaagtggacaatttaggccgaacttactatgtcaaccacaacaacaggagtactcagtggcaccgacccagcttgatggatgtgtcctcggaatcagacaataacatcaggcagatcaaccaggaggctgcacaccgacgcttccgctctcggaggcacattagtgaagatttggagcctgaggcctctgaaggcggtggagaaggccctgagccttgggagaccatttcagaggaaatgaacatggcaggagattctctcagcctggctctgcccccaccgcctgcctccccagtgtcccggaccagcccccaggagctgtcggaagaagtgagccgaaggttgcagatcactccggactccaacggggaacagttcagttctctgattcagagagagccctcgtcaaggcttcggtcctgcagtgttaccgacacggttgctgagcaagctcaccttccaccgcccagcaccccaactaggcgagcccgttcgtcaactgtcacgggtggtgaggaatccacgccatcagtggcctatgtacataccacgccgggcctgccttcaggctgggaagaaagaaaggatgcaaagggacgcacatactatgtcaatcataacaatcgaaccacaacttggactcggccaatcatgcagcttgcagaagacggtgcctccggatcagccacaaacagtaacaaccacctagtcgaaccccagatccgccggccccgtagcctcagctcgccaacagtaacttgatctgccccactggagggtgccaaggattcacccgtccgccgtgccgtgaaagataccctttccaatccacagtcccctcagccatcaccttacaactcccccaaaccacaacacaaagtcacacagagcttcctgccaccaggctgggagatgaggatagcccccaacggccgacccttcttcattgaccataacacaaagactacaacctgggaagatccacggttgaaatttccagtacacatgcggtcaaaagcatctttaaaccccaatgacctgggccctcttcctcctggctgggaagagaggatccacttggatggccgcacgttttacattgaccataatagtaaaattacccagtgggaagatccaagactacagaacccagccatcactggtccggctgttccgtactccagagagtttaagcagaaatacgactactttaggaagaaattaaagaagcctgctgatattccaaacaggtttgaaatgaaacttcacagaaacaacatatttgaagagtcctatcggaggatcatgtctgtaaagagacctgacgtcctaaaggctaggctgtggattgagtttgaatcagagaaaggcctggactatgggggcgtggccagagaatggttcttcttactgtccaaagagatgtttaacccctactatggcctcttcgagtactctgccacggacaactacacacttcagatcaatcccaactcaggcctctgtaatgaagaccatttgtcctatttcaccttcattggaagagttgctggcctagcggtgtttcatgggaaactcttagatggattcttcattcgaccattctacaagatgatgctggggaagcagataacgctgaacgacatggagtccgtggacagcgagtactacaactctttgaagtggatcttagaaaacgaccccacggaacttgacctcatgttctgcatagacgaagagaactttgggcagacataccaagtggatctgaagcccaacgggtcagaaataatggtaaccaatgagaacaaacgagaatacattgacttagtcatccagtggagatttgtgaacagggtccagaagcaaatgaatgccttcttggagggatttacagaacttcttccaatcgacttgattaaaatttttgatgaaaatgagctggagttgctgatgtgcggccttggtgatgtcgacgtgaacgactggagacagcactctatttacaagaacggctactgccccaaccaccctgtcatccagtggttctggaaggccgtgctcctgatggatgctgagaagcgcatccggttactacagtttgtcacaggcacctccagagtacccatgaatggatttgccgaactctatggttccaatggtcctcagctgtttacaatagagcaatggggcagtcccgaaaaactacccagagctcatacatgctttaatcgccttgatttacctccatatgaaacctttgaagatttacgggagaaacttctcatggctgtggaaaacgctcaaggcttcgaaggtgtggattaaggaaggctccagcgtccggggcactgcccttccagcaagttccaagcgcacttttgcatttgccgagcagacttttgcagagccggtggcagaagcagtggcctggcccggctctggagcccagcttgtctgggccctgcccaagttccgccagggaacccagccccagctcaagtgccgccccctcaccgccaattctcaactggttgccgtgtacactgattacatttcaggaggacgtgttctatttatgttgtgcctctgcaggcaaagcccttaataaatattttgcatactttctaatg

SEQ ID NO: 171 - DNA, 773 bp, Mus musculus
aaacttgctggtgttcagagtgcctccagaggtgcgtggtgcatacactactttggagcaaggaaggcagaagaccagacagggtgccctagggttgcccaggtagacttctatcaacaccagtccaacagcacacatgccttgtttgtcttgattctcgaggacaaccacagcgacccatacgtgaagctgtccttgtatgtagctgatgagaatagagaacttgctctggttcaaaccaagacaattaaaaagacgctgaacccaaagtggaatgaagagttttattttagggtaaatccatctaatcacaggctcctatttgaagtatttgacgagaacagattgacacgagacgacttcctgggccaggtggacgtgcctcttagtcaccttccgacagaagatccaaccatggagagaccctatacatttaaggattttctcctgcgacctagaagtcataaatctcgagtcaaggggtttttgaggttgaaaatggcctacatgccgaaaaacggaggtcaggatgaagaaaacagcgagcagagggatgacatggagcatggatgggaagtggttgactccaacgactcagcttcccagcaccaggaggagctcccccctcctcccctgccgcaggatgggaagagaaagtggacaatttaggccgaacttactatgtcaacacaacaacaggagtaactcagtggcaccgacccagttgatggatgtgtcctcggaatcagacaataacatcaggcagatcaaac

SEQ ID NO: 172 - DNA, 1141 bp, Mus musculus
cccacgcgtccgaagcagctagcttctgggaggctttctcagatgtgttaaaacttgctggtgttcagagtgcctccagaggtgcgtgtgtgcatacactactttggagcaaggaaggcagaagaccagacagggtgccctaaggttgcccaggtagacttctatcaacaccagtccaacagcacacatgccttgtttgtcttgattctcgaggacaaccacagcgacccatacgtgaagctgtccttgtatgtagctgatgagaatagagaacttgctctggttcaaaccaagacaattaaaaagacgctgaacccaaagtggaatgaagagttttattttagggtaaatccatctaatcacaggctcctatttgaagtatttgacgagaacagattgacacgagacgacttcctgggccaggtggacgtgcctcttagtcaccttccgacagaagatccaaccatggagagaccctatacatttaaggattttctcctgcgacctagaagtcataaatctcgagtcaaggggtttagaggttgaaaattggcctacatgccgaaaaaacggaggtcagggatgaagaaaacagcgagcagagggatgacatggagcatggatgggaagtggttgactccaaacgactcagcttcccagcaccagggagtgagctcaccacctcctcaccggccgccaggaatgggacgagacacgtggacaaattagggcgaactttactatgtcaagcacaaacaacaggagtactcaaggggaccgacccagtgaatgggctgggtcatcgaatcgaaataacaccggggcggaacaaccaggaggcgcacccggagcgtccgacgcaggaggacctactcacacactggggccggagccctgaagggcgggggaaaggccaggagcctgcgcacaccatcttgtggaactacacggaaggagaacccaagcagggtggcacacaggtgcacaaagctgagaccccagagaggggcacgagacaggaacatcagcacacaggaaaacaacctgacacgacacgagcgaagcaaataacaagaccacaacagagcacgagcactacaccgaccacaacgcaacaacacaaagctgcaagcgcagcaaa

SEQ ID NO: 173 - DNA, 259 bp, Mus musculus
ggaaaggcaggctgcatggagcagggaaaatcccgtatcctcaaattaaaatttgtttctggaattgacctcgccaaaaaggaaatatttggatccagcaaaccatacttgaatctgtccttgtatgtagctgaaaaaaataaaaaacttgctctggttcaaagcataaaaattagaaggacgctaaacccaaggtgaaataaaaatttttattgtagggtaaatccatctgatgtgagggtcgtgtgtggaattagtt

SEQ ID NO: 174 - DNA, 729 bp, Mus musculus
gaggagtggttcgccatctggcggggtgcgcgcccaggtctggctcccctttcgagagggagaatcccgtatcctcagagtaaaagttgtttctggaattgacctcgccaagaaggacatatttggagccagcgacccatacgtgaagctgtccttgtatgtagctgatgagaatagagaacttgctctggttcaaaccaagacaattaaaaagacgctgaacccaaagtggaatgaagagttttattttagggtaaatccatctaatcacaggctcctatttgaagtatttgacgagaacagattgacacgagacgacttcctgggccaggtggacgtgcctcttagtcaccttccgacagaagatccaaccatggagagaccctatacatttaaggattttctcctgcgacctagaagtcataaatctcgagtcaaggggtttttgaggttgaaaatggcctacatgccgaaaaacggaagtcaggatgaagaaaacagcgagcagagggatgacatggagcatggatggaaagtggttgactccaacgactcaacttcccagccaccaggaggaggctccccctctttccctgccgccaggaatgggaagagaaagtggacaattttaggccgaactttactatgttaacccaacaacaacagggagttcctcaagggggacccgaccccacctttgatgggatggtgcccttgggaatcaagact

SEQ ID NO: 175 - DNA, 645 bp, Mus musculus
ttagtatgtctttatgtgaggctccagttcatgtgggggacaaagagcttaaatattttcaaattccgcagatgctcagccaactcagcttgctagcctcacaccatagcaggggcctcgagttcagcggcggacagggagaatcccgtatcctcagagtaaaagttgtttctggaattgacctcgccaagaaggacatatttggagccagcgacccatacgtgaagctgtccttgtatgtagctgatgagaatagagaacttgctctggttcaaaccaagacaattaaaaagacgctgaacccaaagtggaatgaagagttttattttagggtaaatccatctaatcacaggctcctatttgaagtatttgacgagaacagattggtaagtccttggttttgagttttatttctttaaaactgggtttttcgaaccatgcctttcagatcttctgggtcacccgcagtgcgcatgcctccaagaagactgcttttgtttcactgttaaagttctcagttccagcaaatatttgtgtgttgctaggtcagaaaattgatttgagtatgtgtgtatttcttttatagttaatactaataaaagtcacctatgacgacctcaccccagatgctttgtttggggaata

SEQ ID NO: 176 - DNA, 642 bp, Mus musculus
  modified_base (522): a, t, c or g
gatctggcggggtgcgcgcccagggagaatcccgtatcctcagagtaaaagttgtttctggaattgacctcgccaagaaggacatatttggagccagcgacccatacgtgaagctgtccttgtatgtagctgatgagaatagagaacttgctctggttcaaaccaagacaattaaaaagacgctgaacccaaagtggaatgaagagttttattttagggtaaatccatctaatcacaggctcctatttgaagtatttgacgagaacagattgacacgagacgacttcctgggccaggtggacgtgcctcttagtcaccttccgacagaagatccaaccatggagagaccctatacatttaaggattttctcctgcgacctagaagtcataaatctcgagtcaaggggtttttgaggttgaaaatggcctacatgccgaaaaacggaggtcaggatgaagaaaacagcgagcagagggatgacatggagcatggatgggaagtggttgactccaacgactcancttcccagcaccaggaggagctcccccctcctcccctgccgccaggatgggaagagaaaggggacaatttaggcccaacttactatgttaaccacacaaccggagtactcaggggcaccg

SEQ ID NO: 177 - DNA, 682 bp, Mus musculus
  modified_base (387): a, t, c or g
ggagtgacaggcaggctgcatggagcagggagaatcccgtatcctcagagtaaaagttgtttctggaattgacctcgccaagaaggacatatttggagccagcgacccatacgtgaagctgtccttgtatgtagctgatgagaatagagaacttgctctggttcaaaccaagacaattaaaaagacgctgaacccaaagtggaatgaagagttttattttagggtaaatccatctaatcacaggctcctatttgaagtatttgacgagaacagattgacacgagacgacttcctgggccaggtggacgtgcctcttagtcaccttccgacagaagatccaaccatggagagaccctatacatttaaggattttctcctgcgacctanaagtcataaatctcgagtcaaggggtttttgaggttgaaaatggcctacatgccgaaaaacggaggtcaggatgaagaaaacagcgagcagagggatgacatggagcatggatgggaagtggttgactcccacgactcatcttcccacaccaggaggagctcccccctctccctgccgccggagggaagaaaaggggacaattaggccgaattatatgtcaccccaacaccgggatactcaggggccccaccagctgagggagggcccggaattaaaatacatcggcaataaccc

SEQ ID NO: 178 - DNA, 364 bp, Mus musculus
gagttaacaagctgcaggccagcctggtgtagatgcttcagagcacacggataagagttcttgactgtctggttccttcatcttcattgtgtagaaatttttcctatgaaagccatcttaactccaagagagtactgatgctggggagaatcccgtatcctcagagtaaaagttgtttctggaattgacctcgccaagaaggacatatttggagccagcgacccatacgtgaagctgtccttgtatgtagctgatgagaatagagaacttgctctggttcaaaccaagacaattaaaaagacgctgaacccaaagtggaatgaagagttttattttagggtaaatccatctaatcacaggctcc

SEQ ID NO: 179 - DNA, 425 bp, Mus musculus
gcgggcacttcagccagtcgcagcgtccaggaccctgcgcggggcgccggctccatggcgaccgggcttggggagcctgtctacggaatttcggaagaggagggagaatccgtatctcagagtaaaagttgtttctggaattgacctcgccaagaaggacatatttggagccagggaaccatacgtgaagctgtgcttgtatgtagctgatgagaatacagaacttgctctggttcaaaccaagacaattaaaaagacgctgaacccaaagtggaatgaagagttttattttagggtaaatccatctaatgacaggctccctatttgaagtatttgacgagaagagattgacacgagacgacttcctgggcccaggtggacgtgcctcttagtcaccttccgacagaacatccacccatggccag

SEQ ID NO: 180 - DNA, 3272 bp, Homo sapiens
gggcactgctttaaaactgggaaggaggaagacgaggccagggagccggagggtcaccaaggtagatttccagcagcgctagtccagctgaacactttccagccttgtttttcagcagctttgaggaaaagtatagtgatccgtatgtgaaactttcattgtacgtagcggatgagaatagagaacttgctttggtccagacaaaaacaattaaaaagacactgaacccaaaatggaatgaagaattttatttcagggtaaacccatctaatcacagactcctatttgaagtatttgacgaaaatagactgacacgagacgacttcctgggccaggtggacgtgccccttagtcaccttccgacagaagatccaaccatggagcgaccctatacatttaaggactttctcctcagaccaagaagtcataagtctcgagttaagggatttttgcgattgaaaatggcctatatgccaaaaaatggaggtcaagatgaagaaaacagtgaccagagggatgacatggagcatggatgggaagttgttgactcaaatgactcggcttctcagcaccaagaggaacttcctcctcctcctctgcctcccgggtgggaagaaaaagtggacaatttaggccgaacttactatgtcaaccacaacaaccggaccactcagtggcacagaccaagcctgatggacgtgtcctcggagtcggacaataacatcagacagatcaaccaggaggcagcacaccggcgcttccgctcccgcaggcacatcagcgaagacttggagcccgagccctcggagggcggggatgtccccgagccttgggagaccatttcagaggaagtgaatatcgctggagactctctcggtctggctctgcccccaccaccggcctccccaggatctcggaccagccctcaggagctgtcagaggaactaagcagaaggcttcagatcactccagactccaatggggaacagttcagctctttgattcaaagagaaccctcctcaaggttgaggtcatgcagtgtcaccgacgcagttgcagaacagggccatctaccaccgcccagtgccccagctgggagagcgcgttcatcaactgtcacgggtggtgaggaaccaacgccatcagtggcctatgtacataccacgccgggtctgccttcaggctgggaagaaagaaaagatgctaaggggcgcacatactatgtcaatcataacaatcgaaccacaacttggactcgacctatcatgcagcttgcagaagatggtgcgtccggatcagccacaaacagtaacaaccatctaatcgagcctcagatccgccggcctcgtagcctcagctcgccaacagtaactttatctgccccgctggagggtgccaaggactcacccgtacgtcgggctgtgaaagacaccctttccaacccacagtccccacagccatcaccttacaactcccccaaaccacaacacaaagtcacacagagcttcttgccacccggctgggaaatgaggatagcgccaaacggccggcccttcttcattgatcataacacaaagactacaacctgggaagatccacgtttgaaatttccagtacatatgcggtcaaagacatctttaaaccccaatgaccttggcccccttcctcctggctgggaagaaagaattcacttggatggccgaacgttttatattgatcataatagcaaaattactcagtgggaagacccaagactgcagaacccagctattactggtccggctgtcccttactccagagaatttaagcagaaatatgactacttcaggaagaaattaaagaaacctgctgatatccccaataggtttgaaatgaaacttcacagaaataacatatttgaagagtcctatcggagaattatgtccgtgaaaagaccagatgtcctaaaagctagactgtggattgagtttgaatcagagaaaggtcttgactatgggggtgtggccagagaatggttcttcttactgtccaaagagatgttcaacccctactacggcctctttgagtactctgccacggacaactacacccttcagatcaaccctaattcaggcctctgtaatgaggatcatttgtcctacttcacttttattggaagagttgctggtctggccgtatttcatgggaagctcttagatggtttcttcattagaccattttacaagatgatgttgggaaagcagataaccctgaatgacatggaatctgtggatagtgaatattacaactctttgaaatggatcctggagaatgaccctactgagctggacctcatgttctgcatagacgaagaaaactttggacagacatatcaagtggatttgaagcccaatgggtcagaaataatggtcacaaatgaaaacaaaagggaatatatcgacttagtcatccagtggagatttgtgaacagggtccagaagcagatgaacgcattcttggagggattcacagaactacttcctattgatttgattaaaatttttgatgaaaatgagctggagttgctcatgtgcggcctcggtgatgtggatgtgaatgactggagacagcattctatttacaagaacggctactgcccaaaccaccccgtcattcagtggttctggaaggctgtgctactcatggacgccgaaaagcgtatccggttactgcagtttgtcacagggacatcgcgagtacctatgaatggatttgccgaactttatggttccaatggtcctcagctgtttacaatagagcaatggggcagtcctgagaaactgcccagagctcacacatgctttaatcgccttgacttacctccatatgaaacctttgaagatttacgagagaaacttctcatggccgtggaaaatgctcaaggatttgaaggggtggattaagcaccctgtacctcgggggtggttgttcttcaagcaagttctgcttgcacttttgcatttgcctaacagacttttgcagaggcgatggcagagagcagctgcaggcatggtccctggagccgagccttcaccacgcactcgtccaagttcggatgcgggaacctggtcccagcttgagttcctgcctttcccaccacaaattatcaactggttgatgtgtacactaattacatttcaggaggacttaatgctatttatgttgtgcctctgcaggcaaagcccttaataaatattttacatccttaaaaaaaaaaaaaaaaaaaaaaaaaa

SEQ ID NO: 181 - DNA, 1080000 bp, Homo sapiens
  CDS (826985)..(827008)
  full exon 1 range is 826667-827008
  allele (827008)..(827008): the 'n' at position 827008 may be 'a' or 'g'
  CDS (843242)..(843315): exon
  CDS (922549)..(922630): exon
  CDS (926021)..(926059): exon
  CDS (929123)..(929176): exon
  CDS (993104)..(993154): exon
  CDS (999547)..(999608): exon
  CDS (1000354)..(1000456): exon
  CDS (1002118)..(1002284): exon
  CDS (1006117)..(1006249): exon
  CDS (1007860)..(1008036): exon
  CDS (1010940)..(1011014): exon
  CDS (1018160)..(1018291): exon
  CDS (1018800)..(1018919): exon
  CDS (1020028)..(1020225): exon
  CDS (1026659)..(1026736): exon
  CDS (1028113)..(1028167): exon
  CDS (1034316)..(1034374): exon
  CDS (1041390)..(1041455): exon
  CDS (1043121)..(1043350): exon
  CDS (1044868)..(1044989): exon
  CDS (1047519)..(1047589): exon
  CDS (1050296)..(1050391): exon
  CDS (1060368)..(1060441): exon
  CDS (1062648)..(1062708): exon
  CDS (1064561)..(1064620): exon
  CDS (1066207)..(1066314): exon
  CDS (1067768)..(1067864): exon
  CDS (1068609)..(1068681): exon
  CDS (1073289)..(1073388)
  full exon 30 range is 1073289-1075279
tattgtttttaatttagtttggctttagacacatggttcaacttggcctagttaggtctgggatttactggtgcctctcattcatttcatcatgttgattaccactggctttttccaaattctgttcttcatagtaatatgtggctctactttggttctcccatttcctttgatgacgtgttaatattgaagggcaaatggaagccctagttctgaatgttatgatccatgattgcccctctgtcatatccagtgctggtaggctgtgaagatgggccgggggagatgttgtcagcaatcaggggtaggcatggcaaggactgtggaaacagacctggctgagggtctgtctccaggatataagtgagccaaccaatggccaggagccaagaggcatggccaggtggtctccttgcaggtccgagaagtctcaatctggttggtggaggctgtttacagagctgaatccacaaggagattggatgagattgagtgcaaggttataggctcaatatggaacaggaggtccaggtggggaaactgaggcagagtccagtggtatgggctaggttaatatgggaaagaagggggcaaaactgtttatgtgagatctgttccatccttggcagctaacctaattctgcccttctaggctgatgtgccaggtttgcctcagtcaggatcgtctgttgtctggatcagggctgagcacatggatagccatggctcttgctcaggagtgcgatggaagaagtggctaatagcagcaatttggggagcccattatgtgagcatcagaccttccccagatacccccacctcactggtggtgaggagttccccatatgttgccagaggagtctggcggggactctaacagtgatggtcctttattacctgcagtttggcagggaaggaacaggcaggaatagaccaagcttcctataaagatacaaatacatcacctcaaagactgacccattaaacgattgtaacttctaacatcttagtctaatccagcttctcacattaacagcttactctcatcaagtccccaaaaagaatggaagccaggacagatgagcttgataaagatggcaatggttctcagccctggtgagacattagaatcatgcgccccagtcccaaagttctgaattaattgatcttgtgggggacccggtatatatttttaaagtctcctgggcagttctaatgtgtagttggagtagcaatcctctgatttagggcactgtgcacttccagggggagggagggagtatggaacaaaggagcccagagtaaaaggaggtcatgggaggctaggaaagcctcctcccacccaaagagtttgcccagtgtctgtcctgcttttgggtctttaggccacttctaaatcttttcacttctaattattccccagcaaatcccacctccttccccaggtcaaagcagactgctataaaggaaaaaggagtggagtggaccaatgtctctttgttaagaaagttccacaagctttgttttactgctttatttggagtctgattttttaataagacggggcaaaaatgggcattagtatttgtattagtccatttttatgctgctgataaagacatactcaagatggagcaatttacaaaagaaagaggtttaatggactcacagttccacatggatggggaggcctgccaatcattgtggaaggtgaaaggcacatctcacatggcagcagacaagagaagagaacttgtgcagggaaattcccctttataaaaccatcagatcttgtgagacttagtcactatcatgagcatagcatggaaaagactcacccccgttattcaattaccctccactgggtccctcccacaacacatgagaatcatgggagctacaattcaagataagatttgggtggggacacagccaacccatatcagtattccacacatccacagaggtacccctggtattcaaggaaaaacagcacaaagaaacagaccactcacattaggattatattgggtgctttttttcacccctaacagtgtttttgtaattgaaatcattaaatgggagcattaaaagggcccttcaaggccatctggttcagcccatgcaccccatgaggaatcagcagggctgcattcaggagcattcaggaatttacctttaccccaacctgagtttcaatcccagcttggctacttgctagctgagccaccttgggcatgtaacttatgttaagtttcctcagtttacttgtccataaaatgggactcatgatacctacctccacaataccacagagtggttgtgaagaaaaaatgagtcaatgacaaatattaatccacttcccttattagaattttgaatactgaatgtgatatttgatcctcccaccatcaccacacacaacagcattttagcaccatcaatttctgtcattagcatttgggatgttctgtggtgtcaacctcatttgatgaagttgactaatgggctacctaggtagaagcagaaaatatcttctcctagcagtttgccacagtgacaggaaattcatcatcattgctatgccttaactagaaagcagtactgtttaaaaaaaaacatggaagggggcccacactcggagtcaaaagaattaggctctgatcccagttccacaaatgtgtagctgtgtgatcttgggcaaacaacttaaactttctgagcctcggttttctcatatgacaaaacttgctctgcccacctagatatgataagggccaaatgaaattgtatatggcagcagttcccaatcagtagcaattctgcctccacccgacccgaggtacatttgacaatatctggagacacttttgattgtcacaactagtgagtagaaggaagggaagctgctaaacaaacatcctacgttgcagatgacagcctcccacaaagagttatcctgtccaaaatgtcaatagtcctgtggttgagaaagggctttgtaactttgagaggctcaggtgtcattcttaaacaacaagtacctatgaggaggttcacagtggctttcagagtcattgccaccttcgttcagctaatttctcagacccctttccaacaggacacagaactatgcggagggcacacccctctaagaagccttgctcagggcaaaagtgcagggcttagcaggctggcccctgtggagggcaggtctcccgccagccagggacacttagaagggttgtgagcatggggaggtttaacccagcatcttcatgtaggtttttcaaagatgcctcaaacccaacatgactcatatcaaattcatgttcatcccacattcactccttctccatggttctctgcatcagcaaatactaccacccttcatccatgagtttgctcaggccagaaatccaaatatctatggattccatccacttctctatatcacctattctctctttctctctctctctctctctctgtgtgtgtcacacacacacacacacaaacacacacacgctgcttaaaagccattcaaaagcttttccgataaagaccaaaatttttaacacagcctggcctctggcctgactctccaactttatttattaccattctcctcacccctgatgctagccaatcagttgtggcttattttagctctttgaaaccaccatgccacagggcctttgcacattcttaccttattcttagacactctcccattttcttgccctaattaactcctatgcttcctgcagatttcagcttccagcttcagcttccagtcattacattttcagggaactgttttctgacctccttgacaagccagttccctctgttatccctcttgtgaccaccacctctcctccataacccctaccctgctggtagtttacatttgtaaaagtcttggatcaaagtgtatctccctcactaaagaaaacattccaccagatttgctaactatcatattcaccacatagcacacagtgccttccacatagcaagaaatgtataaatatttgttgaatatgtgaatatggataccaaaggcaaatttgaggccaactataaaacaaacaaacaaaaggcagaaaaaacactcttaggttcattttaatttttgaaccccttttgtgccaagactagcttttggcctaatggaatatttttatgctaaaatgtctgaaatgctgtctgatgcctctgagcacacttaggcaaacatttctggtacaaagagagattatcaggcaatctgccttccctagcaccaaatactgttttccttgggcacgtcccagcagctgctgataaatctgcagacagtccttctcaatgatctttgtctcccagctttatcaaggcagcttctaggaacaatgctcctactcagctatcaggctggtcctacataggggtccattttggagactctccttaaagttatctgactgcactgcgctttcctcatctgtgaaatccataactagcaacaaggcaggaaccaggctctgcccaccaaggcccatgggggtggctctgcaggtgaggggatgattcttccatctcctgtgtggtggagcccccaaagggagcccaggccttctctctgcgttctactccaaagggcagttctcagatatagcaactgtgagtgatatatttttattttcccggaaaaatactgagcttctgttcaaatgagatttaagccaacatgaaagatggaatgtgctattttttttctttcctaaggtcctcgatgtcacatccagcaaaagcaggttgcccatattgtggtaattattgtctaagctcttattttgaacaaaaggaaattgtgtgtgtgtgtgtgtgtgtgtgtgtgtgtgtgtgtgtgtgtgtgtgtgacagagagagagagagagagagagagcaagagagcaagagagagagagattgacctggggaaggagaggcaaggagggagaaagaaaggaaatagaaagaagagagagacagcagagacagaaagaggaatgatgaagggaaagaaaagggagttcattccagggaattttttttattaaattccaacacgaggaagctctgtgtacatgggctccccgttttctccttctgaagcctgaaggcaaaccaggatgctgtgtcaattacagaaaaaaatcaatgaagatactgttcaggagtccttttcaccattcagtgcggatggtatccttcactttctagcactgattcattgactttcagcctctctgggggctgctgacatattgctatctctgaagaatctgaagcaaaatcacctttgtttcctactgcaacttgttcctccgtgcagttcgttagaggggccaccacatgacctccctcggctcgtaggactgaagggcaagaccttgctgggctcgccatgggctttggtgcctccctccatcaacctgccatctcccccgctgaggcacccagggcccagtcaggcctcctgactgtaggctgagagcctcataaattttcaaacactgtttcctctactgtgtctattctgactctaaaacaaattcctgctccagtactagtaccctcctagctcaatagcattgtagaagacatcttctaaagaaataaaacctattccaaagcaatggcattgatgaaggaagcccaggcattaagacacagaacatccctggagcaggcactggaagtgaggtatggagccatctgcacaactggatttccactacgacagtgccattcatttgagttaagtaatgcccttctcttttggccccattttagattttgaacatttctttttttttttttttttttttttttgagacggagtctcgctgtcgcccaggctggagtgcagtggcgcaatctcggctcactgcaggctccgcctcctggggttcacgccattctcctgcctcagcctcccgagtagctgggactacaggcgcccgccacctcgcccggctaattttttgtatttttagtagagacggggtttcaccgtgttagccaggatggtctcgatctcctgacctcgtgatccgcccgcctcggcctcccaaagtgctgggattacaggcgtgagccaccgcgcccggccgattttgaacatttctagagaggttaagacttcagtccttgtactagtttcttattgctgctgtcacaaattatcacagtcttacagcttaaaacaacaaaaacttattctctctcaagttctagagttcagaagtccaaaatgggtcagcaggactgcattctttctggaggttctaggaaaggattcatttccttgctttttctagcttctagaggccacctgcattccttgactcatggtcttctctctccattttgaaggccagcacatagcatcttccaacatagtgctctctctcttgctctctctctctctctgtcatcacatcaccttttctggctttgcttcctttgtcacatctccttctctacctttaccttcttatgaggatcatgtgattacatcaggcccacccagataatccaggataattttcccaactcaaaatccttcaataaatcatacctgtgaagtcccttctacctataaggtagtgtgttcacaagttctaggaattaagacatggacattcgggaaaggcattattctgtctgctacactccctgactttttagtataagcaaataaggccacccaatttcttcccagttggtgacagagatcagtggagagacacaggagtcaggtaagaggggaatggtgtgcactaaaaagggggcaaagagtacagagttgagaggtagaggtggtatagcattgatttcattgatttttttttcctgactttatgagtcatgtagaaggattgtcagctaaaatggtgctgtaaatttatggtgtgcattctctccaccccacctctattcaaacacaacgatgacagaaaaagtgaaatctaatttaaaaaatttaaaagacacaaaacatccccacggaccaggaacagaaaaaaacagaaacatggttaaagcaccaggcttgctgggccttgagttcgaaaggatgtactcgttactgagcaaccaatgagctgacagctgcctgacgtgaagccaataccatggcatcagcttttgagcaaagaaaagctttattgcaagtcaactggcagcggacaggaggaaatgctcaaatctgtctccctgagctgggagctgggactggtattacaagcatagcataatgagatgtgatctgattggatcttataatgagatgataccagggctccatatgattggatcctgaatcctgtcattcagtgtctccttcttaattcagttcttgcgcctccatcttagcacttaggttctgcccatggtttcatacatggttcatctgggcatgttccaattacatgagcttcaacgtggaggtctgtggcaactgcaaaacaattcacagctttgtcacataaaagtttaactagattggtctggtgtggctacatattcagtcaactaagagggtggttcctgtggagataaaggggcccaaagttccacgaggtgaggctgaccctgaaaccagagatgggttgggggttccctgcttgtgaaagggatacgaaaaagctttctagctaccccggccaggggctgatgctgagttgaagctgtgcacacctagggaggcagagagaagcaggcttcacaaccaagacctaggccaagccacccactggctcgatgaacacttttgagatattggcaatattatcgtgcgctgggattctcaagccaacaattatttagttctgatagggtgttccaaaggtccaaactgctagacagaacgatcattctggttattactgttgcatagcaaatcacccaacaattctgtagggtaaaacaagtcattttactttgctaatgtattctgtagcttaggaatgcagacagggcatagcaaggatgtctagagcctctgttggaggtgactcaatggctggagtcaccacctggaggcacatttgctcacatatctggaggttcatgctaattcaagacgttagctgagctgttggttgccctctacatgtgttctctccatgagggctattttggccttcctgatagcgtggtggctgtgttccaaaagtgagagtgagcatcccaagagagcaacgtggaagtgtacggcatttcttttcttttttctttttttttttttttttttttgaggcagagtctcgctctgtcgcccaggctggagtgcagtggcacaatctcggctcaccgcaacttctgcctcctgggtttcaggtgattctcctgcctcagcctcctgagtagcttgcattacaggcacctgtcaccacgcccagctaatttttgtgcttttagtagagacggggtttcaccatgttggtcaggctggtcttgaacccctgacctcaagtgatccatcagcctccgcctcccaaagtgctgggattataggcgtgagccaccgcgcccagccagtgcatggcatttctatggtcttgactcagaagtcacagtgtcacctcatcataatctattgattgaggcagtcacaaaggttggtttaggatcaatgcgagtggacatagaccccatcacttgtgaggaccattagtcagattccaacacaagcatgtaagatgggaagtattttttgcctaataacttgctgagaagttttgagatatcagaaatattattgtgggttggaatccccaagccaacactccaacacttagttctgattgagataccccaggaggcaagtagagatacctactaaagtattagatagagttagccatagaggatgggagggaaaacttccgcctcactcaaaatgagtctgcaaactaatagtccaaaatccgaaatgtaaataatctaagaaagctaaccagaaaaatcaacaactgagagatgaaatcacttcacaaaaaaattaaaataattgagcaataagaaaatgattttttattaaatacttctgtgataatatcctgaaacaatgaaagaaatagcatctttaaaagtaatgagattatcaaattagaaagcagaattaatcaaaataggtgattataaaaggtaactgtagaaatcttgaaaaataaaccacaatggatgagatagctctaaacttgatatggtgaaaaagataattagaaaatttaaatataggacaaaataatttgctcataatatacaacagagaaaaggatgaagacatttaaaaatggttaaggggacagtttcagttgtggtaatagtattgtagcttgtttcagactctctcacacataacaattataaactctgtaaaaaatattaaaacaaacacttgaagacactgaagaacaaccaaaagcaggcaaaatctgaaagagatatgtcccttgaaaggcggaagccatgttggatgacatatagccattttcagttgagagcagactccagtccatacagtgaagagtcaccagatctcaagcagaaagctgcagtcttattgacttcaggtgtcagaggatagagttccagggcagctggaaattagagaagcaaatcctggaaaggagggagccatggcatgaggtgccaaaaatctgcatacaaactccccttaaattattggctcacccctaaaatgcatattcacaataaggattctaaaaagacaagcaaaaatcaagttgaaatggtaaaataactaagcagagatatcggatgcccaccccaagagagtgagagctatcaagttgggaagtcttgctaaacaccttgagctttatacagacactccctcttactaaaggcaaaaccatgcctccacatgttcaaagtgatgagtcagtgatttaactccatgttagaattcttcagaggagggtcacagaattcagagtcaccacaacatatcatcgcagtgtccaacatgctatcaaaaatcattaagcatgtgaagacacaggaaatgtgactaatagtaaaaaaaaaaaaaaatgtcaatagaacagactctccctccaacccccagccccaatgattcaggaaatttgattaaacaaattttgatatttttctacagtaaaggtctactcagcaaaaggaaaaaaatggactactaatacatgcaacaacatggttgaatctcaaaaacactttaagtgaaatagaccaaacacaaagatatatgctgcatgattccatttatacaaagttttttttttaattttatcattattatactttaagttttagggtacatgtgcacaacgtgcaggtttgttacatatgtatacctgtgccatgttggtgtgctgcaccccatttatacaaagtttgagaacaggaaaaaacaactaccctgtgatgaaaaaaatcagaacagttttccatgagaaatgagaattgactaaaaggaagcataagaaaatgttattgaagatggaaatgttcttaattttgattgggattgtggtttcacaggtacgaattttacctcacagtacgaattttcacagtgtacgaattttacctcaatttcacagtgtacgaattttacctcaatttaaaaagtaaaagaatagttgggaaacagaggatagattgaaaaatttgaaaacatatgtaatcagaattctagaagaactgaagaactgatggcaagacaacattcaaagaggaaatggctaagaattgttgagagatgttgactcctcagactgaaagtgtacaccaagtgccaagcacaataaacaaagataaatcccacttagacatagcatcgtgaaactgcagaacattaaagataacatcataaaagctatgagaaacagggagaaagaaaagattttctacaaagacatgctcattaaactgacctcaatcttttcatcagcagcatggatgccagaatacaagtgaacaatatcttcaaagtgttgtaggaaaatgtaataaaagccatataccttgctaagtaccatataccttctagagtcagggcaaaataaagacttgttaaatataaaaaactaatagtttttttaaccactcacatgcttcctgaataaactactaaaggacattttccaacaaaaagaaaagccaaattagaggcaaggtgtggggctaaccagaaaactcagaaatagcagaacatattggcagccaccactagctagtaactacagtcagtcaaagacaattttagtattttaagaggtaattaatgtaaaagtaacataatgaatgttcattgtagaaaatttaaaaagtacagaaaattataaagtataaaaaccacccaaagtccagcactcagagatcacattgctgtttccactagccatgtacccataactgagaacctgtaccagtgtatgttcttttcaagaagatatttaatgatatgcattattacattagatgattcttccacaatggatataaacaatctgcctttcgatttgtccctgtatttactattttccataatgttgctataaaaatctttgtgcatacatttttgtatgcgttactttgctagatccctagcaaaggcagttctgtaaattctgtccattgtagaaagacctggccttattggagcagatggagcattcagttcctctcaaatgaaaggcatctggggagtataaacaaccctgtactgagaagccaagatgggattttgaatctatcctttcgctgaccaggccaatcaattgcttctctgggctccaggatcctcatatgtaacaacgaagttgggtagagcgtttggcaggtcccttcctgctgtaaccttctacaccacacaggcagatatcctgttcaaaccgccaataataaggcctgatcatgtccaaaagagcccccctttccccagaaaaaagtctggctctacaacaatggaaaacttctccctagtcccagctcccagggcaagtgacactatgaggcaagagctgcttgcagagagaggggaagctgaaaccgcacccctgggtgggatcagatttccccagtaaagactgacctcaacacccagaatgtgctcctggcccagggtgctgtgctggaggccaagtcggcttctctgacatgcttgccggggctagagttggcctgtctcctcggcctgtggcccttcaggctgaacagacccacagcaatgttctggtgcagcgcttcccacaagcagaagatagaagacaaatccctgaggtctgaaaatcatgcataaaaagacctacagcaaaagagaaaaatctgtttttcactttaaaatgcatgtgctttttctaccttattccataaagtttctgtatttatttgagtgtagaaaacgtttcccccactcttcaagtaaaattgatatcccccagaagatgaaccacattcactgtgtggcttaaaataaccccagcacacacaacatccccgaccagtggaaagcgcaagtagctgggttagagaagcaggactctcctctgccccgcaccctctgtgcttgctgtcagtagcctggctgtcctcaacctcagcactgtttccagtcctcagcctgggagctactcaatttgtctctcctgtttttttcagtggtcgcattttgaagatgctagatgtattattccgaaaaccagctgtccctaaatgagctatgcctccaagtaactccatagttggtgataggatgtttcctggtataggtgtattccacataagtgaaaaaaaatagattatcatcatcttgcaaccctctaatgaattaaaagatctgggtcatgatcatcaatggcagctcacaccaaaagggagacaacaagacaccctgggacttctgacgcagcaccgcctataaagtacgccaggctaacaacaaaaaacaagcctgaatctgaagaagtttcgcaatccaactaccagtgtgcaggaaatacagaggaatctgttaaatgacatcagtgcaatcagtgagatccacagcaaaacatccaatttcctcaatagtaaattgtaaaggggtgaaaaagagaaagagggaaatctatgaactaaaaagagatatcaagcacatgcaatctatgagtcttacatgttctgatacaaacaaactcactatttaaaaatcactggctgggtgcggtggctcacgcctacaatcccaacactttgggaggccgaggcaggcggatcacctgaagtcaggagttcgagaccaacctggccaacatggcaaaacctcatttgtactaaaaatacaaaaattagccgggcgtggtggcgggcatccctagttccagctactcaggaggttgaagcaagagaatcgcttgaacttgagaggcggagattgcaatgagctgagatcgtgccactgcactccagcctgggcgacagactctgtctccaagaaaaaaaaaatgatgcgttcagtgggtacagagtttcagtttgggataatgaaaaaaagctctggagatagatggtggtgatggttgcacaacaaggcaaatgtagtcaatggtattgatctatacacttaaaaatgggtaaaatggtatatttcatgttttgtataatttactacagtaaaaattgtttttcattttttaaacgatttatttttctaactacatgctagtatgtaaaaaaaagtttatgaaactactaggaaaatttgaacactgactagatatttgatgatagtaatgaattactagggctgtattttatgtgtctttatcttttagagatatatataaaggtatttatggattaaatgatatgatggctgtgatctgctgcagattaatccgatgctggtggagggggtggtataagttatataagagtggccaggaattggtgactgttgtagctgatgatggatacaggggtttattgtatatttgaaatgttccctagtacaaagtttttaaaagaagactctggccttgtatagtttacatttgtctgtgagaaaataaataaaatatttagaatatcagctagtgataagtgttaagaagaaaacataagtcaggaatataggaggaggtgcaggctggaaatataagtttggaaattttcagcatgtataaatgcttaaagtcctgagctttgaatgagccatggttacgttcatctagggaatgagtataaatagaaaatagactgaattctgaactctggggtcctcagacctctggctgagaggttggagaaatgaggacaattcaaaaaataattctgaaaagtcagtgagggagcaggaaagcccgtagtagcaggaagtccctaaatccagagacaaacccatttcaaagagggagtgatcacaaatgtccatttatgctcacagcctagtaaattcagtactgaagatgggccattagatttagcatctaaatatctgacctcatgctcctcccggcttctgatctccagctggagtcttgcatgattgaatccagtctagagccagagggcaaggaagcccacagaggcagtccagaatggagagggcctatgggagagcacccagaagacagctgtcacaggaatcttgcctccttcaatccccatccttttggagcacagagttcagaaatgtagggactgtgtttcattagagccagagtaaagctatcatcaccatcttcatcttcttcattctcatcgtcattcttgtttacccaaaaggaatcttaatcattcaaggtgccttgtttcactgtggcagagccaggataacatcccaagcctttggactcctggttcagtacattgcaccatcttccccaacatctccccagtcaccctgctcctgtgaccacatggatgatttacctttattcatcagttaacccattctcatggctggaagtttacaataaggacccctgcacagaaatcccccaagtctgcacactctgtagctgtttgttctttctttttttttctttttttttttttctttctttgtttttttttttttttttttttgacagagtctcactctgtcacccaggctggagtgcagtggggcaatctcggctcactgcaagctccctcccaggttcacaccattctcctgcctcagcctcctgagtagctgggactacaggcacccgccaccacgccccgctaattttgttttggtatttttagtagagatggagtttcaccatgttagccaggatggtctcaatctcctgatctcgtgatctgcctgccttggcctcccaaagtgctgggattacaggcatgagccaccagtccgggcccattctttattatttgtaccacatgtggcatcatcctaaagtcactggaaactgggagcacaagggccacactaggtcctgaagaaatcccgaggtgagtgggaactgtcattaccaataaagagctacctcatttaagtggtctctcctttcagcagagcacagtgtgctgctgccatggctgctgccagcaaaggctgccttccagatcggctcctttctggacatgtgcaaggaaatgtcctgggcaggcaaagtttccattggttttcagatgaaggggctgttttccaggggttgatcccaggaaacataaaagtggagaccacctggggcttcagtccaccctgtgatgttattcttgaagattaagataatttaggaagagtaataaaaaatatgagctaatatttgttgtgtgtttgttatgtcaggcactgttctaagcactttgtgtgtgtgttcaggctgaatcattggaacagcttttggagggacatgcatgtattaccctgacagtccagtcactccactgccccactcatctggatgactgtgtcactcctcctctctcccaaagctgcaggggtaccaccttcctcattcttgctgtcatctgatgactccactaagaaagtacaagaaaccagaacagaacttccccagctgcacgtcttctaccaccagagagtctgtgtcaacatgactcccctcctgctgccatggaagatggccagcccttgtgcatgcgcagtggaccctatccgctcttgcctactctagggcatcgcatcagtggttctcctctcccccatcatcatgttgttactctctgctagttcactccctacagcctaccaacatgctttaatttttcccatgttaaaaaaattccactcttgactccgtatactcctccagttaccaccttggttttcagtccccatttacagcaaaaatccttgaaagagttatttattcttgatctctccaattctcccccaaatctatcctactggggcttttgcctacacccttccatagaacccagtcctgccaagattaccagtgacttacctaaggggccttgtaccctgggatgctgtggggagcttctgtcctttgctaagattgagtgggggagggaactgcctagagctgcctcactctctcatcttcttcccctattccctccaccttcccttctctctccccaacagtctctacctcctactctccccactccctctccatttccctttccccttcttcttccctcctctccctacctgctctcatcccaccccatttccaccccatccataagaggtgggctgtgtggagcatgggtctcagagccagagacacaggcttgcaccctggttctgccactcagcagctgagagacatgggtgagttgcttggctctcagggttcagttcactcctcggtgagaggagaaactaatgcctcatggtgttctccagaggggtcgggagaccatgttggtgtcaggtcaaatgcaactcttagtgtgtcatttgctcgtagttttcctctctgtggcactgtctaaagcttccagaacaaatcaccacaaattggaggacttaaaaggcagaaatttattctctcacagctctggaagctaaaagtccaaaatcaagatgttggcagcattggttccttctggtgactctgagggagaatctgttctgtgcctctccactggcttctgatcgtggctcacagttcttggggttccttggcttgtgaccacatcactccaacctctgcctccatcatcacacggccttcttctctccgtgcctctgtgtccaaattcccctcttcctataaggacacagtcattggacgggagcccaccgtaatccagtatgacctcatcttaacttgactacatctgaccttatttccaaattaggccacattcgcaggtactgagggttagaacatcatatattttgggcagggacacaattcaacctacaacattgtcctgaaagtttgtgcccattgaactgcaggcaacacctgggaggtgctcacagattaagcagagtggagcgccataggggtagtcaaagaaaaggctgtgctgggaaggaggcctgagccttaagccctgcaggaaacacatgagtacaagtgacaacctgggcttcaggaggaagatggaagtgggttgaagcccagctccccgatttgctgcggtgagccttaaacttttcagggaatcacagatgctcccccctcagaaaagtactcacatacacacacacacacacacacacacacacacacacaactgagcttatgatttcaggggttcatggatctcaaacacctgaatctcagaagaactcctgacttccacactttgtgacagtagacaagttatttagtctctccgaccttcagtttctgcactgatgacatggggatgtggtcattacctgcaggctgttaggaagatgtgtgagaattcagtgtggtgacatctgcacgtggcgcagttctgatctccagggaccccagggaatggcagtcattgctcctggttctcttgccacccttctttcctccccactgcctgctgctcctgctccctgggcatggactctcatttccctctccctctccctctccctttcccagttgggctggagatcttcagcctattgggcttgaagaaggtagaagccggggcagagaagaagtgtagggtgatgaggcgatgccctacttctctcatccattaccattagaaatgcctttctgcaagacgtcccagctgacatggactgggaaccatatttttaaaaaataaacatcagaccttaaacaacatatcatgggcactgtgtcagaatgtctctggccaaattaaaccccagctcatctggtttaaacaatatggaatatttgattttccttcacatagctagaggttgtggtgaatggaagctgcaggatcagttagttccatggctcacgacatcctcaagggcccagctccttctgccttttcactgtatcatcctcggtgttagctttgtcctcagctgtctcccctcatggtcacaaaatgggtgccatcgttccagatctcccaacaaacacaatgttcaggggaagaagagggactgctcttccttgggtcttattttaaaactgaggtcatctttctcagaaatcctcccagacacctcccttcacatcttgtcggccagaaggggcctgtgctccactgagagactatgtggaaagaatatggaattaggatagtgggattagactcaccagaaattagtcttttttttttcttttttttttttgagacggagtctcgttctgttgcccaggctggagtgccatggtatgatctcagctcactgcaacctccacctcccaggttcaagccattctcctgcctcagcttcccaagtagctggtattacaggcacgcacaaccatgcccaggtaatttttgtatttttagtacagacagtgtttcaccatgttggccaggctggtcttcaactcctgacctcaagtgatccaccagcctcggcctcccaaagtgctgggattacaggtgtgagccaccgcacccagccccagaaattgatcttaaggagaagatgggtgttggagcatccactgacagtgcctgttacaggtaccaatcaggaggctcagtgtgttctgaggtaatagaagatgcagagcttgtggatgagtcaagcttcaatgcaatgatccaattgtgaaacacagtgcgcaaaagattgcttaatcctaaattgtaaattaaggggaaaatgtatcattaatgagagcagacaagagaaatgcctaattctaaattgagagtggagaatgagggcaggaaactggggatggttgcttagaggagacgccaataataaagtgaacacatcttcagcgtttagtatatgcccgacacaatgctaagtgcatcacatgcattaactcactgaaccccttcagtcgtcccgtcatagttactgcaagttcccatttggtggtgaggaaactgacgcacagagaggttaagtaacttttcctaggtcattaactttgttcactggtccctgaactaacttgattctggttgacttcagacccattctgttacttaatccctggccattcctcctccctaacctcataaaacaaaactttctaagaagacaaatatgagttccccagatggtgaagctagagaaaggaagttagtaagttcaggcagaaggggcagcaaatcagaaggagataagaaggatcaaatacaccttctagaaatgtattagcaggtttaggcaggaggcagttaggacctctgttagttggtccaaaaataaaggaagaggcaaattgaaaatatgtatatacattattttcaaaagaggaaatattagtattaacattaatataattaatgatggatgggtatttccagaactgagtttcatgtcatcagccttaagaaaaactgagtttctataaaggattcttgagatttggaaatgaatctagaaagccattcagtgtccaagcgagttggctcacaggccatacttgtagttcctccatatctgccagtcaatattctccattctctgcctccatgttccagagggaactaggagtcttcctcttggtcaccaaataggctattgatcaatgggtgggcggaccacagtcatgggtgcacagcccagcactgcttcccaccaagggccataggcagggcagaatcagctaaatagaccctaacacaaggcaggataacaaagaagggagaatcaaagctgacccaaagaactgggaagatgaggttcctggaagcagcaaagtggatggagaacatttaaaagaacaagtttgtaggaggaaggaaggtgttcagttttgaatagctggttttgagaagatgatggtacatccaagagatggcattagaggggcagaactagaatgcagggcaggactttatacacagagatgagattcagtcacattgatgtgaccattcattccattattgagagtgtatctggcactgtcctaggttctagagctgcagccatgattagaataaagcctctgcccttgtgcagcatgcaatcgaatatccaagcccttgaaaagaaatgatcctctgcacaactctccatactattttctgtatcctgtgtgaccatgcaaagaaaagggtgaggctgagttgggaaaacacaacgaagatggtgaacaaatgaaaactgaaacagggaaagcaccatcggagaacagagaatcgagaaagtgtcattttatggaagccaaaagaggaatgagtttaaagaagaaattagtgtcaaatggccccaggctagcagcaaagaaaaagtcatgaaatttgacatgagggttgccattggtaagcttctagcaatggtttttgatccttactgtgcatcagaatcacctgaggagctttgaaatacacagatgcctgggagctaatttcgagatccagactcaattggtctgaagtgagacttgggcaccagtattatgtttcagtgactctgatgatgctaagaggcaggtagagtcaagaaacactgctttaaagaaagggattccagcaaatgttcattggctccatttagcctttccacaatgtgtacatatttcaaaacatcaagttaaatgacgagttaatgggtgcagcacaccagcatggcacatgtatacatacataactaacctgcacattgtgcacatgtaccctaaaacttaaagtataataataataataataaaacatcaagttgtacaccataaatatatacaggtgtgatttgtcaatttaaataattaattaagggagctctgacaaggaaaataaggaagtgattcttgtagagtgatagcagtagaagctaaattgcagagattaaaaagaagggtgtgtttttttcatagagagactagcagtcttaacatcagacatggatgtttagcctcagtctcctgccttactgtgtgatttaacctctttgtgtcttatctgtgaaatcaggatagaaatacttgctgtgcccaactcacagtttccttgggaggtcaagatgggataatacatgtgagagtactttgaaaaaagattgaagtgctataaaaaatgtaagatttatatggttgtcagatttttttccccaaagatggtcctgaagatagtgattatcaactgtaaagacctacatggaaccagcatccctttccacactgagctcacaaagtcagcaccctttgataagtgctcacagctactatccaaaggtctaatgctgtttgcaactctcgctttttcacagctagctttgcactgggtctataatagatgcagtttccatagtcttgcaaattttgcctaaaattgctgaacaacacagccttctggcataacactacagttgaaggatgctgctgtaaaggttaaaaaggaagtttactgtgatatgatccccattagattgtcaaccctgtggttatagagaaaagggaaagcagaacagattgagagacatctgtgagagcaagcaatgctgcagtatctgaagagcctgatttctcaggcagatggggaaggattggcaaagatctgagccaaacccagcagtttttttcagtgaccaccttgaggtctatttgagtacttggatatgcccacctacataatatatgccatgctgggtctccaagtaacgaagcaatacttctctcaatcttctgcaaactctgactgcccttggggtaacacctggacccaggtgagaaatggaacttctttgcggtgactaaggtccaggagagaggctttcttcaatcatagatgatcttagatgtgaagagtaggattacaaagtgctttctactcactttcaggctgacattttccttaggggaagataccaaaaaaatacaattctttgtcaaggtaatagcatacttaatagttcagcttcttttttccaattagcagcttgaattcagagcaaaaagaaaatgaaggacaaactgctaactagtagtgaagccaggtgtcagataactggagaaagcatcagaggtatccccgggaagatcagttacctccatctctcctctaagcctgccctggctccttctactctggttgcaattaggatgaaggtgctaattacattctccaccagcagaaaggctcacttcaaaactgcccttctccaaaccgaagtacagacaccaaagccagccaccccctcatcttacaccacctccaacaggactcagagcttttttcatgtaaaaccacaggacaaaatgggattttgaaatgaagatataaggttgcttcacaagggtacaaggatcttcttatccagtgagaagtcactttccctgtgctcaaacatccttgtaaaaatccaggaggagaaaggggcacataagccaatggaaataccaagtccatggctcctttcttaatgacaaataactactttgaagaaggatccttcatgccccagggtacgggagcctaaatctctggcttgggaggaaatgaggaataatactgtagtcattcagtcctttactaaaatctcactgtttaaaaagctgctgttatcttggccaagttatttaacctccctgagtatctttctcctatattaatggaaaagaataaaaatattatcatacagcattattgtgagcatgatttgagatagaacatgcagggccataatgtcaaacatggtgtaactcaatctttttttttttttttttttttttttgctgctactgagactgagtttttcaatattagaaagtccggtgacctccttactatgtgaattccctgtgaacacaagacaagaaatctcagcctggagtatgtgcttataattggagcagggggcccagagcccagggaagggagtgcttagcagtttattcttcaacaattcctatcgtttcatctgtggaagcagtactcatcaataaatcagcaagtgacaggacatttttcaaaactgcatggaaatgttaccattttatactgttataatcatacacaaacaaaagagtatttttcccctgctctcaaagatacgttgttgacacagtttcagaagcacaaggcagaaaaactgccccaaaactcaagatgaaggctaaaattagatttttttcaaacacctcccctgacagtacctagtaatgttattgtggctgttgtaaccgtgggtgattgcctatacacacagttggtgcaatgaagagacacaatagcttaaaactaaactgtaagattatttttcaagtagcttctccaagtataatacctcagcttctagaaaaagtaatcactgctaacatttgaaaagtcaaaattctatgcaagggtctgggagattaacacgattgagcataatagctcctttcaaaccatttcctagggactaggctgcaaaaagccttaagcttgaagatggctttccaaatatattttatttattcaatgaagaaaaagactatttgaagtttccatattcctttcacatacagacacttcactgagctttaagagaagcattcgtctgtaggcgcaaaatgagtaattccccagcttctagaaaatgcaatcagtgcaaacatctgaaatgttaaaatgttgtgcaaaatgtcttttgtagagatatagaaaaaaaaaacctgaagtaaatatcattttaaactggtctcagcatttatgtttaaaaatgaatacatactcatatgcttagtatctgatgcatagatcatctccggacagcaacagcagctgcttcttgggagggtaactgaggccctgagagataacagtgggagggcgtttgttcacagtgcatccttccttggctttatattttgtactgtgtgcatgtattaatattaatctaacttaatctaaccacttaatttaattaaacatggcctcttcaataagcgagtcagctcatccatcccggtggagcagatctttctccaccatcagtactggatgctgaccttctccctggcctggacctcagggatgccgtacagcaaacttccctgacttcttttcacactgagcactaggtgggtgctgtgctggcactaaaaggatacaatgaacgtaagaggttgtctcagggccgtctgcacaggattgctagccctcccttcccaggctcctgccttactcagctttctccagggaccacaggaggcctctgcatatcttatgtaccactctggtcctttccttgttgcccccaacccctctacccttgccaacgtgcactcccttcctcaggaactctgagacacaatgaataagggagaaggtgaaagcccctcttcctctgggctctggagtaccagtgaaacacactggggccaaatcctcttctggaacacactaacaatatgaccttgataaagtcaacctcactgagcctgattctgaactcttgaaatggtggtggtcattatatcctcaggggaatggaatagagattgaatgagatcagttatgtaaaatgcccagtgttacactcaacacatagcatgtgagcagtaagtgttggatgatatcatcgtcatcattgtcagtagaagcaatggtagttctcactgccaaaacatgattgtttcaacctccgcaggcctgtacacatctccagctctctgtcctgggactcacttacacacagtgtggattagcggaaagggtgggctttccagccagaggggctttaccttgagcaagtccttaacttcttttaatgtcaatttctttaactataaagtgagaataattttataccttcctcataggagtggggcaaagattatagataatatctacaatgccctagcacctaagtgccctacatatcttggctgttttgactttactccaagggggctgatctatttactggctcctgtcaagacttgccctcttctgcctccacatctttgttcagttctgttgccctccctgccccgtcctctctttccacctccatctctggaaactttcatgcctctgtttcatctgagagattttatgacactttctctgaccacagtgaattttcccacaattgaattcgtagactgcttatcttctgtagggaaataggaggtgcaaatccagaagactccaagacccttcctctgagtcctctgttagacttattagaaatcaaggtgttaggcaacagccggcagaaaggactccggtcacatgcagccaaagagcagctcctcagtggactcactctgagctccccacacgatgatctctgtgttgcctgggaggggtcacttgccctcctgaaagtcaactccctgatgccttattcaggggtgtctcataaaataaaatggccaattggttcattgataaattaaggcacactggggcttctagcacgtggacagactgcagggccacgaggcgcgtcggctgacatccgcaggagcagctggtgtctcacctccccacgggcctggctccagctgctttgacatccattcagtgcaaatcacattgagtcactcctctctgtgaactttggatggttctgagcagcgctgcgagaggatcctgaccaagtcctcaccatgtcccacaggcccatcccgatctgactgtagtcttctaggcttttctcttgcagcagtcacctcctacctcttgctcttccccaagcccaccataatctttcctgcttctagtctttcctttacttggaatggcctttctaaacttctgtacctaatgaatcctactcatgctttaaaatccagctcaaatgttgtcccctatgaagaactttgctaacctcccagacaaagcgtgttgcccagttttctcagcagtcctctagtgtggagctttttgcgtagtacctctgttacatttacatccttctccccaacaagaccataagcatcgtggggtcaaggatgattttataacccctgagtctgccaagcatggtgtctgataaccaacacatttcattgcatgaataattaaagaaaacagaaataaatgaatgaataaacaatgctctttttgttttgttttgtttgagacagcctcattctatcacccaggctggagtgcagtggcgcagtctcggctcactgcaacctctgcctcctgggttcaagtgattctccttctttagcctcctgagtagctgggattacaggggcccaccactgcactaggctaatttttgtatttttagtagagacagggtttcatcacattggccaggctggtctcaaactcctgacctcaagtgatctgcccgcctctgcctcccaaaggaacaatgttgtttctaacaaaatacaccacctttcctggccttcccacctaaatgggttcctggaaattgttcttggccagtatgggttggtgaggggctagccagggagcagagtcatgttcgcaaaaggtgggcactcatgagagtggaagaagggaagtaagttcctatgtctagaataacactctcctagaaaacattacatctgggggatttttcatttctgtgcttcttattttcactcgcctatactcttgcacaggattgatttccaatgaaatttgataagtgatattttgttaaaatgtcctgattttttttaattattaaatagctataatcccaggcctgaaaaatcccttatccagtagctacagttgttttttgaagcaccgccaccaaaattattcccctggtaattattgagcaatccgttttcacccataagcctgtcacatgtaataaggatgcctgcctgcctgtttattttctggctaatttggtccctttacatcatgtgaccttcagtggcctgtatgcaatatgaaaatcgtcctcctaggactttctttagaaggttcacagaggtgtgctaagcataagtaatacatcagtttttaaatccaggcagagcaaacccatatcagatgtctcaggaaagcctgcaatgctgttttataaagggaacagacgagtttcttgatctttgctattctctgcaagaaaatatctcacctaagtacatcctttcgtatgcactctgtagcaggacatttacagggtcagagaaaaagacactaaaaacttacccaagctgttagctcatatttattaactgcttaatataggccagggtgcaaaggcctttatatgctttgtttaatcttcccccaaaccctgggagatttttatcccagttctgcagattagcagactgaaacacagagaagttgtaacttacccaaggtcacctggctgtggatgccagagtaagcatttattttaattgatacataataatcatacatatataggtacatagtgatattttgatacatacaatacatagtgatcccatcagggtaattagcatatttgtcatttcaaacttgtatcatttctttgttttggggcattcagtatcttctcttctaggtatatgaaaatatacaatacattattgtaactatagtcatcctatagtgctatagaacactagaacttattccttctatccagctgtaattttgtatcctttaataaatattttatcctctctcccccgtacacttcccagcctctagtattctctgttctactttttacttctttgagatcagcttttttagcttctgtgtatgagtgagaacatgcggtgtttaactttctgttcctggcttatttcacttaacataatgtcctccaggctcattcctgttgctgagaatgacagaatttcattcttacttatggatgaatgggattcctttatgtatatataccacattttctttatccattcatctgttgttgaatacttgggttgatccatatcttggctattgtgaacaatgtggcaataaacatggtggtagatatctctttgacatactgatttccgttcctttgcataaacgcccagtcatgggaatactggatcttataatagttcagtttgtagtttttttcaggtacctctgtactgttctccatagtggctgtactagaatgcattcccaccaacagtgtatacgagttcccttttctctgcatccttgccagcatttgttattttttgtgtttttgataatacccagagtatgcttttgaagtcaggtctttctggctccacagtctgaaggtgtaacactaccccaggctgcctctccatagcatgtttcctgatttctggttcaagaagactttttctaacaggtgtcattcctagatggctctcttaagatcttactccctttggcattttacaccttactcatacaatcatttttaaaaaatagcaatttaaaaaaatacagttcaagtgttcatcatatccaggcatgcaagccttttctaaatttttttaaataataaaaaagccccacagaggaaaggaggttatttgtgtcctcctgacacacacttttagattttggttaaaaagtctctagtgggtgcaaagtgaccccctttgtcactggaaacaaataggagcattctttgtgccactgtccacaaccacacagatatgtttcccaagggagctcatcaggtcttcaaacatttagcaagcatgacatgtgtaagagacagtattggagaagtaagacaagccttgctctgccgaagcttacaatccaggagctcaccccttcaaggaatttacagcctccagacagataataacattaggtccatgaaagcctacaaggcaagaagttcaggagagaaagaagtcataaccatcttggaagaatctcaacttgttttatcagaactcaaacgccaatttctcacccctagcttccctcattagcgcttattaactagtattgggaggaccaagcgaagagtaaagctagggtagcagaggccataagctaattgcaaaggacagagctaaagaaacatgctagtttcccctgagcacccaactgcatgactgaaaatggattaatttgtatttctaatggatatacaagaaacacgtgaatatgctaaaataaatttaaggtcaagcaatgcaaagtgttagtgcgtttgccttccactctcagaggcagcctctcttatttggttcttgggctgcttcataaaaagttctgtgttttttaatggcctcagcttttgggaggctcaggccacctagcccatcaggagaccaggcccgaaggatggatctgaagagtgggcaacggagagttaaaccagggctgacttcaacaggcccagtcaagtcaggggcaagcacattgtccatccactggaagacggaaaggggagaggaaggcaggccctcccgactcacaggtcacctcgcaactttgctaggcactacccaccctttagggataagtgaagtatgtggtgggcatacaaggcgcacaggggagtcattctggcaaattccaagaaggttttaagggctcccgaggcaggcaggcccagttgctgtttggagcttcctttggggtgggaggatggcgggggcagggggccggggcggtgccttaacgaggggagatgcttttaaatagctgccttccaaaaaccatcctccctgcttctttgagaagcacccagctgttgtttaccctccaggacagcaaatccggttatttgtctctctattccgtgatattataaagtaatgaatggtccattaaactaagtttgggatcccgtctccccacagccacctcctcgccggcaccctcagccggggaggccgtaggctcggctgcagcctggcagcctcagtccccctccctccaccatttccccctactccctccctctcctgcaccccctccccccggttatttgggagattagagttcattaattaaatcctgtgcttagatcgaactgtaacattattccaatcacatttatcttgcaggcggcggaggagatggcagcctcgctggaaacgcgcgggggagcctgagccggcggccggggacgcacggcgctgcgcgctccttcgccacgccgccgcgcagcccctccatcttcctgctcggcaccgggccccgcgcgcccctgcctacggggtcccgctgctctccggggctcctgccagccccaacccccggccccggtggcctccccccacccccgcccgggtccccctcctccgccacacgcgcgcgcgctcacacacacacacacacacacacacacatatatacacgccagcgagctgctggccgctcaatggaccgatttccccggtttccctgaacccagcccagcccgggatgagaaactgcaaaatggcccgggtcgccagtgtgctggggctggtcatgctcagcgtcgccctgctgattttatcgctcatcagctacgtgtccctgaaaaaggagaacatcttcaccactcccaagtacgccagcccgggggcgccccgaatgtacatgttccacgcgggattccggtgagtgcgggcctctgtgttagtgccctcgggaatttggttgatggggtgtttggggaagggaaggcgtgggggaggggtgttttggcctctccgagactctttgggccagataactgcgcggtccttccactcctctctctaattctcccttccccctccctgttattttttttttaacccaaagcccctagaagccgctgtccaaatcgatgtgattgcatttctcgtattcttcctcagcatcccttccctcatttcagaaatgggggttgggggaggctttcaggagggtgagggtggagggaaagacggtgtgtttgttcgggagggggcggcgagcagagatggacaggcgtgaggggagcgccctccccgcgccctgtccgcagactccgcgggccgggcccggggcggtgcgggcggtttaatggcgcaggcgccggactcccctcgcgccctcctccttttctcccccacgcctatcaaaggacacgcgggtttattctcaggaagcccctggggcgttctctctcgaccctttcccccgcagccaccgccccccaccagctttccgggatttctgcaattcccccgccccctgcgggaagcgagcctcggaagggccgcccaccctcgccaggtcggagtcaccgctccgcgctgggccggcctgtgaaggctccaggcgcagcttgacgccgctctgcgagagcccccgccccgctctgtgaccccgggaactctcccagcagggcctcctgacgggcaggtggcaactacaaagtgccacctgtggtccaagctgggaccgaggcgaggaacccagaggagcctcgcctggaccgaggagcggagtaggccggcggcccccgggggtccccagccaagttataggaagtgaaatcggacgtgggtttgggaaggaagaggttaaggcaggaaccacccccagactttccctgggtctccggtttcctctgccctttctccaaaaacaattctatggggctgcaaaggcgtagcgggtcaggctggcggggcggccgctgtccgcggtgctgattccctggtcctcgcagcgccgcgggctccagccctgcgcccggcgtgcgccctgctctccgcatgacggccattttatggtctctccggcacccggagggatggacaatgcagatggggttccctagttttctttttttctctcgggtgtgtgtgggagcagagggtggaccaaatgagaggggctccgggacggaacggagcccgcacgcgtaccagccgccctcgccccagccgctgcactttaatggctacctcggcttccccgagctgaggccagcacgcttgtctgtgctcatgctcctctccaggtcacaatttgcgctgaagtttctagacccgtcattcgtgcccattacgaattctctcacccaggaactccaagagaaaccttctaagtggacatttaatcggacagcgtttttacatcaaaggtaggataggaggaaaagatccaaaaggtgcttttaagaattcaagagctcaaaacaaaacaaaacaaaaacaagcaaacaaaaacatctaaaacaacaaacatctatacgccccaccctcaccatcaggtgtatctgcattgttttcttggcatgactgcacaaagcaatgatcaggaaccttctcctgtgtgtgtagtgtcctctcataaaaaggacatatcaggaccaatttgaatagcaaaaaaaaaaaaagcattccacttgggcttgattgagcaccatgatttacagctaacaagtctggcaagtactgccaaagccatctatttaaaaaaaaaaaaacagacaaaaggttagttgcaaaaagaccacccaatgcattttcatttcctcactgaaaaaaacttgaaaaatagaataaagtggtattgtttctttgaaacacacggaaaatgccataatctgtctccatcaaattactcgtgaaaatgctggcccaaatgtatgtagatatttaactatggttttgttttggttttgcctgttttcattgtctttacagcttttaacttactgtaaaggtacctaacttaattcctactaattgtagcggtttcattttatacacataagatggttttgaggttttgtttttttaggtggaagaaggatgagatttgttcaaatgtatttattctgctcagtgattctggtctactcttagcaaaccacgataactcattactccttccttcatggtgggattattttactgctaaatgggatgtgagccatctagcgtattcattagaagtgtgaatacttattttacaaaccactctatttagggagttgtgttttgatcttagcatttctagttattgctctctctctcttttaaaagtttaatctatgggcagaattaaaacaaattcagtgggtattcatggtctcatgaaaatactgttcagatgaaaagtcagcatacagtcatatgattaacattttaaaaacacttatgtttaattataaattagttcatgaaaattgatcaattctaaaactctagaagtgtttttttaataattgggttttaattcaatattaattttatggacaacccagaacgttttcatgggtagaacacattctagctttccccaaaacatgtttctaactcaataaaaaatattcttcccacactaggccatgtgacccaaatgaccagtcagaagaatatttccttctcaaaacttcgctcattttaattaattagataatctttcattaaatttttaccagtagcattttaaatctgccttacctttttaacaacttgtaagagtggtactggtaacttggggagtttcaaagatttcagttgctgttgcctctattttgaagaatgaagtcatttttaaattaaaattccaagcaacggatgatgtgcaaagcatttcatttcattcctgctacatttaggcaaaagttataagaaattcactgggtttacttaacatcggagaatctagcagcagtagcatgttaccagtctctcttgaatgttttaaatagctaaactttaagaagagatacttaattttacttaaagctcaatatgaaagcaacctgaaattagttctaagtatcagtcttgccttgtttatgtactgaattgctagaatatggaaatattttcaggatttataatagccatgttttctaaggattagatttattcaactaaattgtgtttctatataatcaagtagaaaaaactccctgtttcattattcaaaggaccttaatgagattatcatctcatttctattaaatattcagctacacccactgctattaccatcttcatattttaataatagatagtgctgtactgactcatatctatttggctcttatttggacaccactgatatttgatattctttgagcacttcagtccagtagcaaacaagtagaccctagttacaaactatgtgttactaatgtttgtgcattaatgtgagctctttcaggcctgtgtaaattgtctccctgtattttctgacacaatttgccctatacctccctgctgatcaaataagatacactcttcacgtagagcagaaaaccaaggtatggcagctaaaactgtaagttgcatttacaagcctcaaagaatacacccagaaattgactgaaagattagaatatgcggagattctgaagcagtcctcccttcaaggaccacaattatgtatgtataatcttttttggattcaatgagcctaagattccctctgaatgaaatgtcagcataagtcataagatggaaaatcaattcttctgaatggaatgcttttcatgaatttctttttattttaggcaagaaattcttcagcatgtcgatgtaataaaaaatttttctttgaccaagaatagtgttcggattggacaactgatgcactatgattattccagccataaatatgttttctctattagcaataacttccggtcacttcttccagatgtgtcacccattatgaacaagcattataatatttgtgccgtggttggaaatagtgggatcctgacagggagccagtgtggacaagaaatagataaatcagattttgttttccgttgcaatttcgcccctacggaggctttccaaagagatgttggaagaaaaaccaatcttaccaccttcaaccccagcatcctggaaaaatattacaacaatctcttgactattcaggaccgtaacaactttttcctcagtttaaaaaagcttgacggggccattctttggatccctgcatttttcttccacacttcagcaactgtgaccaggacattagttgacttttttgttgaacacagaggtcagttaaaagtccaactggcttggccgggaaatataatgcaacatgtcaacaggtgtgtatattttattacattttactcatactccaccagatggcaaatcaatgttgtaatctcttgggggtgggagccatccaattcattagttgttgtggtgagtttagtagtaattagaagaaactcatatgttttgtaatgagcgaatgaatgaatcattctagctaagaagttccatctacccacagctggtaaccaagtgtcagatggaaggattggggcttcatcagtctcccgtctctattctctgtcctctcccttggtagtaaggctatggagcagtcatggaaatcaccacaaatcaagaattttctttaaatagatagctatattccaagaatgccaatggctaaattagagacaaatcaagtggtttttctttttagaaacgatgcagttgacttaaatttatgttttgtagatgtccaaggttagcaaaacacctaaatcataaattgcacaatctgcctttataatctgatatttgagtgcaaaaacatgaagaaagtattttatgagcatgttgttatctcttgggatttgatagacagattagccagagatgcaatattttcttctagtctggtgattttcaactctggttgtatattagaatcacttgagagctttaaaaatactattgtctaggctctgcctcaagagatcctaatgtaaattatctggtgggcagggaggtggaggccaggtacttggtattttttaacaactctcctgatgattccaatatgcagtcagaattgagaaccactagcccagggcattttataaaacaagattaattgtagattttttttcttttaaatcatctggagaaaattatctcaacttcagtttcccctgtgtaagtagcctcagtgtcctaacatagccctaaatattattataagttggggtgggttctggagacctggtaaacagggaattctgaagatctttattccacaatagatttttcccatcctgtagcctcttaagatgtaagatctgtttagttgacctctcataggaggaggaattacagcctaataaactggtttgtatctcaatggtagagtgatgccataatttacagtccaaactggaacattttctttgagagaaagagggtgctattaataattacaacacagataactgacaaactgggactgtcccagttccccaggatatatggtcacctttttaagtggtgatgtagcccagctcctaagtttaaagatgaatcaactgaggtacaaggagcagaagttatttacccaaagtcactgccctaaatgagcaagactagagttagaagtcaggtctcctgccaacctgtcccatggtcttttgatctcctcattttgctccccttttgttcaatttaagtttgtctataccgaaagggttgtcagagtcattctagttccttagacaggaatagtaaaaccaagactgaacttttaaatttcatttggaaggggaaaggttcacctttgaaatcttcaagtagtgaagaagaaactgcatgtgcttagaaacttccagaaactatcctgtgtggctgcctgccacaaaagtggagttaatcataatgtttcttagccactcgggcctcaaaaaaatacatgggttcaatgaaaacgggaaggaaatacagtccacagaaacctgactaatgcacagtttcattctgcctgcatctccaatgataaatacacacaccacatagaagcctcaaatatttggcggtgtcagcaggaaggcttcagagtattaatattatttaaatatggaaggactaataactataatttattatttacacttaatgtatcttacacactttctgaatttaaaaaatttagcatgccagattgtggcatgctgaagatgggcttgggaacccctagttagaagagaaagaagcaaggaatacaattatttgcaagagagaagaaaaataaggctccacaatctttctaaaccccgaatgaagggtttatttctaggtttgagaaaggaagagacggaggagtttcccttagattaaatgacctccttcaccctatccaagaacactttatgtaagaaaagcagtcattctttttggtggccttctgttgtgtcaccgctgggtcagagccacaccactctttagaaaaacccaggggcagcttcaaaggccagcttcaaaggtgtgcaaacagtgtgatcccaggaaatcccatgctcagaagggcccaacacttggtttaatactttgctcttgcactcgaaattttcaatactttttgaaccaagactccacatttttatttcttactggatctcacaaattatgtaaacagttgtgcccagaagttgtttttggttgcctaaaatataatttcaaaacaagcactatttaagttacagtaacaaatccactacccagcccagtcagatagaccttgctgattgaaactttcaacgctgacctctgaatccaaatgtacttattgttccacaggtactggaaaaacaaacatttgtcacctaaacggctgagcacaggtattcttatgtacacccttgcatcagcaatatgtgaagagatccacttgtatggattttggccttttggatttgaccccaacacaagggaagatcttccataccattactatgacaaaaaaggaaccaaatttaccaccaagtggcaggagtcccaccagctgcctgctgagtttcagctgctgtaccgaatgcatggggaagggctcaccaagctgactctgtcacactgtgcctaagaactccaaacggaaagtgccaaatggctgtttaaaaagtgccccaaatcaaattgaatagccttcagaatagaaccctagagaatgtcttataaggattgtctgccatttaaaaggaaagatgtcttttctcttttgcactgctcttttaagagttttagcagatttagcaggacagatgcattgaagccacatggtttagacttgattgataaagggaatgttgcatttgggactatgctgctaacgaaatggtttgaagtattttcatgtttggattttaataataaactgcctctcatttttatgaggactagagctatagtttctgcagctctgctcagatagtcctcataatcagaggcctctggccaactggggcaggacctgttttgctggtgggatcagactctgaaaaatggaaacgtaaaaaactggtttgcatatctcatcttctatctatctccctatctccatctctatcaccatctcactccctccctctgcaactactccctgccctaccaccgtggagtttaataatttgctaggaatcctattgaattcgctttgcttgtatatgttgcatttgtacttgatgtgtttaaggttctgggtaactttgatgcttcatgacaaaataggcaaatcacgatggactcccttgtgattccttttttaaagaaatgcctctgatgcagtcctcaccagtccattcagtcattctacagcaagatggtccctctgtggtgagtgggatataaggcagtgcatctttcatgatcacaaagaaagcctatgttgtggatagcattgcgtctcttgatgtaggcattgttatggcaaataatagcactgtggccacatctgtaaggccattccagcctaaatttagtgtctcccataatcccaacccatgcactaggctgggtgttctctcagaatatagaggcaatgaatcagcttaagacgctgggacacacaaaggaaaaggaagaagaatatttagaagttgttatggaatcctgtgtaccctaaagtgtggtaaccatgttacccattccagctgggttaaagtggaggaggatcttggccaggccaggtgcccaggtgactagtgctgaggtgcgatcgttttccgtgtcattgtgtgcaccaccaccaatccagaaccatttgctctctttgagaacattgtagcactggatattccctctttccactgaagtcagatctatacaactacaaattaagcatttcaaaagaaaaagccattgtgcagtggcaagagttggaatccaagattatgtagacctgcgatgaaggaagtagctggccattctcattttctttatttcagccatatgagtagaaatcaaatcattcccatccctggctttttactgagcagcactttgttcttccaattcagcccaacgtctggccaagttgatgttaaattttaataagagtttcttctttccaaatgccagtcaagcatatttgttatgcatttgagtggggtagctcattcttttcctgaaatctcatctagattgcttgcaatgcgacaaataactgtttaaaaaatgtgctgtagttcagtgatgagctcattgcccctctttaggaaggtaagatcatgcctaaaattaaaccgaatatggtaaggaaagacactatcgttatgctcacgttctgcctggtcctaaacctgccttattattattttcagaaagcaatctaattagagcaacttgcatagatctagatattaactaatgaaagaaacaccaagttcaaatgtgttaccaattatgacacacattacaatataattataaggggagacattaaaaacattttgtaattcagtggtataatttgatgggtatcacaaccacaccgtgtttgttccctgtccctttgaagaggactgtactaccatcctcacactgtgctctgttgggatcactgagagattgacaactgacagaagtgtttagttggctgttcctgagcacttagttcatttggttatagctaagtgatattaatgccaatattacttgggccagattctgactctggagttttaatcccaatgtgcccattcattttcactaaatataaatgcatagacactttaaaccaagaagattaaaagaggaaaagaccagaatctctaaaaaacagtttactgttctgtagtggacaatttaaattttatctcatcataatgccaaggatttttgtttgttttttaagttcagggagattttttaaatctccttgcagtcttggctccatcttaaccttagagtgggaggactttcccatcccccaccaccgtgttatctatcactttaatgaaaactcaaaatagtgaggaaatggacttttcttcagaacttgaggggtttagagatcaggctcatctctgcttataaggaggacttcctggagatgatcccaatagatcacccttcacttttgaagaatagcagcttctagctgaccatgcaaaatctctgtttgtttttaaagactgtttcaaagattaaatctatacaaccacttttatgaccaaaaaagttgttgtgtcccaagtgtcctaattagaaaggcagctggctctcctgcagctcccaggcttgtgtagtcaagtgcagtgaactgggcagtaatcagctcaggaccattggctctttcctcctctttcagctacagacacatgccctggcttttgcattgaccttgctttgttagttctagactaatttatccttttgtcagacactttcccttttttaggatactcacaacagagtccactttcagctattggaatacattttaccataaagcccccaaggctttctacccataacaccaacacaaaaaaccaattaagttgcagaggggggaaataatcacaaacttttggcaacctgcttaatgctagaccctctgttttcactggttattctgagtgtcatatgcagatgcagatccaagggagacagggctaaatggtggtgtcaagaattcctcccacaccccaaaaattctttccaatatttgattattaaaatatctatcatttctccaccttgtgtctgtgtcttaagtgtctgtgaatattgtaaaagtgctgtatgtttagtagtgttgtgtgcctggcagtgctgactatgactactgtgccatctgtctgtgaccttgatgtcaggtacctggccatggggctaccagcaaggatgtgcaaaggaagaaccgctgcccctgccctcagcttccttatgcccgagccactacttatccgtgaatgtgagtgccaagagaaacctaatttggtggggaagccaaggaatgggagaacgttttttctgatttgagtcaaggcactaattattagacactctcagacaacaaagcggtattgacctgagatcaaaggaagcagggacaatattgtagaatgctaggacactggaaatgaagaggccttcagcttcgccagtcttgattcttgactttacaaatgagaaaatggagaaacagggaggctaggtgatttgccccagatgacactgtcaattagtggagaaattatgattcctcctctagtacttcttggtcttaccagcatcaaatgaagctgggctcacagggaaagtggtttttggtctgggatctgcagagcacataaaataagttagaaagtctataaaagaggaaaaaaggttctcctctccctcccaaaaatgacttcccaacacagaacaataaaggagatgcttgtgtggatatgcaactgtccaccaattatcacctaccttctccctgagatgaaacaaaacacgcttggtaaatcatgatttgataaataacaattaagttactggtggttcatgcttgacagctgcaatcttacccaataagctattcatcttagtaaaaccttgttttagtaatatacatgcataatttagaagttgaaggctgaaaattgttgtgttcttctccatatatatacaactttcatcggggtcccttgagttaagaaatgccttctattttataggtaatctcaacagcagactttgaaatattgtgtttggttcaatatgctaagaagatatacaaataataataacttcgtgagtcttcatgtgcaaaatgacaaactgagcaattttctgtataattctagattcttaaaaccttttttcccataattgtttgaatgcactaggcacaagtttctgtttaagcctctgcttctccctgaatgtgtagaactgtcactttgcttacaaaggggctgtgtgtttgtggctggcagcccagatagagcactctgggtgctggggattgagggcaccttggccagctgattgacctgtctggactctgtggcccaattaatcgaggccacagatcagttggtactaagcatcaaaatgattcattatgcctctctcacactccgattgctttgccacatagataacagcatttgaaatgggaaacactttagaatgtcattattgtattatatattgtcatcttatgcagtatttctgaaatttatttttattgtgatgactgattgaagacatatgtgtatgaatagatgttcctcagtgaagcctattctcttgttgttgatgacagtggcatcagagtgaagagttgttgcagagtaactgacttcagtttaaggttaccctggggttctggggttaggacccggattatgcagctgatctcccagcaaacacagctgtatgaaataagcaactcttcaaaatacaattcttgccactcattctggacctttgattcataatgtcctgggataagtccaacttacaaagattcccaggtgattcgtgtgaccaccatttggaaaccagtaatatatacatccggagtcatatataccattttgaacaaagtagctaaatgcttatctctccttgtgcgattagtttcacatgttcgttgaggttatcatgttaaatggcaatatagacacagtcttagtgattcaacaattcagctgtttcagccgaattgaccagttgctaatttataagcaaatagtaactgatcaatttagtcagaatggatgcaagcccaaagacaaggtggagagcaagctttaatatacactttgtctcaaggccagctcttcatatttccctctttatatttcaaactaagaggcagatctcaggtcactcatctttagaattggtgagaatgagaaacagggaactgaagtgattcattcagattcaatttggaagtcattcccagagcctaaaatatttatctaaggggtctgatttatcaacctcaggtagtctccaaaacacaaaggtattcaggctaaaataaaaccaatcaaaaaaggaaattcaggaggctccagttctaagactaacccagtataacaagggtgatcagttattacttgtggccttgtaccacctctgttggataatgtgccaccgtcctaatgaagctttggccagacttctttctatagctgtgcacatagaaaggctttagacaacagtgataccaaagggttcctttgattttccttctgtgtgattctcagacagttttagctctttggtgtgctgccaaatgtttaacaactggctctggaaaacagtggaacccagatttttagcacctaccaatttctatggtgtaaatactctcatctcagccaatttcaggctactaacttaatgtcaaccagctgaaaacacaacaatatgttttcaagagccagtataagttggctccaatacagcatgagccagctccagcatagcactgcctgaacaatttttaagtcagtgagtaccaaataggagaggctagcagaggctttggagggacttttaaatgtcccctccaccaagggaagcatttccatgttggttagttttactgatttttagtaaaagagcatattattggatcccaaggtgttcaaatattccacgtgactcttaggaacctctcaacagactccccagtatcttgggagattaccaactgtggcttttctaatttctaagggtgaccctccaggaaaacattctttaatttaactaccagttaaaaccatgtttggctgatcttttttaaaaaatctatacctatagttcatcacttgtttccccaactttgtcattttccctatccacttgcccctcatccttctgacacaataaaaaaaatacaggtacccacaaaacagtgcctgcaaaggagcaggggaagaacaaggcacccagtaagctcacttggctctacatatctggaaaggcactgaggttccaaggtctctaccccaccaggggacacccagtaaacatcacgctgagagtttaagttgcactcaactggagttgatttgcccttagaaaagtttccaacggtgaagaaataccacttggtaggaatatctctgggcaacttcattgctgactgggcaaactttgtaggataaggtgtcatgtgatgtaaggctggaccatgaaaaacaaaaatctactaatacacatttggcccctgcagtcccctggcattgagcaatagagcaactgtcctttctcaccactagttgtgagtgtacttccaactgagtgtttagaaatcaggtaatctggtaatccacagaacaagctttgtttgcaaattgcaaatttttctggtagaagtcattcttaggtgggcttcattaaatctttggagaggcaatgctgggaaaaaatatgcctaattcctaggacacagtgagtggccgtaagttgttatctgcatgtactaaatcaaaattagatcatgaaggaccaaatctacttccgttgctataataaaataccctacaggttctgtaaggcatttctaaactgtaaatgcttgaaacgcaagttggacattttctatactatgtgtaaaatgccaggttatacctctattttctttcttcctaatggtcattgaaatgagcttgtttctctacattgagcaagctacattttattttaaatgagtcaggtgcatgttcagatgtctgtattcccaatacattgcatgcagcctgagcacaagtatgccttcaccctctggctcttttcctgacaccaaacagagaagtccacagctacaagcacaaggggcttgacaggtaggccttgttttattatgaacaaattcaccagaaaaccattcttgaggaaccagccactcccatagcatttttagtcttagggaagaaaattggcagggaagaaaaattgacagacaatgggaaagaggtttggtcaacctgcataagtggaataaagtcattgaagtacttgcaaaaagaagagggaggtttccctctgaaggaatctagaccattttttaatatggagaataactgtaccccatgttagaagtgctctttagccatatttcaagatccagatctgaacccatactgtgcagaaaagcacaagagcgcttacagccaagagccctgggaggagttgagtaacaggctgagatccggtcaccaagcatcattagttagcactgaaattctcccaggacacaaaacaaatgtatggaaacatcgcaatacactatcatttactcacatgggacaaccacctaagtccatagcaaaactttacagatctagatgttatctcaagtcaggattccagatcaacatcctccatgtggagatgagacaactgaggttcagaaagttggagtgacttatttgcccagctagctaactggaattagagtctgggtctcccaaccactgattctgctacaccacactgtgctgcttccattagttagatggacattgacaattaattgtgaaagcattaattagaagtcaagacaaaagaatgtttgtgatatcttctctcgcttaacatactttgatttcaccattgcatttcagcattttaaagaatagtgtatcagtatagaaggaggagcaaagctctttaagagtaatgatgaaaccaaaaggtcaaaaagtagaagaatagcgaatgtaagttattaaataaatgagcaagaagtatgtgtcagggaaaataaatgcttcttatattgttaataccgtgattccctgcccgctcaccccgtcactcaacacttgatgcatttgttttggaaagtgccattttatgctgagatactggtattgaaaacttccctctttcccaactctgtcagaagttctcttgctctttggaagaagccgagggccttaacaaatcagactgacctcccttgtgacaggcagcctcgcctgcccttggaaacaagctgccagaatgtgagggccacagagacccaagagaagccagcactgctagactgaggaacttgtaaatatcttctgctttcttggtgaacaaggacagaggcaattgcgtgtatattgtgactgtagtttgtgaagaaaatgcaaccatttgcttcgacagctcctcaaatgtacttgttaagtgtgaatgtgcctgcctcattgccttgtgttccaaacacagtactgaatgcgttgtttttaaataaaccatttcgttttgctttgggaaacactgctggttgtctgtcacattcgggagagcccccacacacacatacacacacatacatgtgctaacacatactcacatttcatccagtgaagagattgaatgcttcctcctgttttatattctcagtgttttgaggtcgttggaaatttgtaggaccccagaaagggtgagcttggctgtctacagccatgaacaagcaggaaatactcaaagtccctacacataacttttccattggtcctttaaatgctaatcatgtgacaggccttaacattattaataataatacattactcttgaaagttactattacatacatcattttatttaatgaataatcaggtgagggagagatgctgagggagttgtccctgctgtgcagttaagtgacaagtcaaaatgagaactcagcctgactccctgtccagttctccttcctctgtacctttcaccccatcccaggctctccctagatcacctcctcatagaaccttccccaactgctacagtcagcctctatcccctttccctgtgctggttttcttcatatcattttttaatggtactattaacttgtttactcattgttgatctgtgtcatccactatattataagctctaccttcaacaaagcaggaaacgttgcctgtctattcccactacacccccgatgcctagaacagtgctatgagctaagtagactctcaattgatatttataggatgaatagatggatgaatgaatgggcagatgggggaaaggagagatggacagatggataaatggatgaacaggtgcaccatggagtctgtgtaacacttcaactgtttctcatcatccttcccatctttgtacccacaccacagacaccaaaagtcttagcttttctctaactgtgctgcctcagacagcattgtgaacaaaactcagtaagcatttatggactcaaggaatgaacgaatagtcctaggaattatttttctcaatatctgtgctccagtgtcaaaaatgtctcagcatatcaatgcacaaaaacacatcctgttcttgttcctggttgatttcaatttccagcaaaaggagaaactcaagttgggtaaaaaaatacagcatgattgaaagcatgccaccttcagtagacacctgagagggcctgtgggtctttaattcaaacctaaaatccttactgttcgctgcacataacactgggcaagatatgaacaggatacgaaattagcaaaatcacaatgcttatccgaaggaacttaaaaaatcttcttggggaaatggtgcaacatactacaggtgtatgtcttataaggagaaagagagagacagaaagaaaaagatgaccccctgaccccattaaatttgagtgaagacaacaaaaattttagtggtcaaatgtaatgctcagggcttatattttctgaaaactatttgcccagctgatgatccctggcaaatacacacacacacaaacacacacacacacacacacacacacacacacgcaaatggtaagttctgaaacaaaacaaaacacttcacaaacttcagcaaaacacgaaattgacaccaagtttattgcaggctctctgcctgaggctgattagtaccaattaaaattttaaagtagaaattttttttctaagaaaatacattaccatagcttaagacaaggaagaatttttttaaaagagatagaaagagagagaatccctcctcatagaagatccaacctagcccaaggctcccaggccagtaaagatgctggccttctgattccatctaagcaagagtgtgagttcgccctcggactaggttcccacacaggttgagggtccaggggtggctggtatcagcctcagctccagaatcattccccgttttgagtgtgcaattcttggtaagtgaggttggctcaaggaatatgctgctctgaacattaactcatactgctcagaatggcagagctgatcagaaacttagagattcagtcaattcaatgctctcatttccagatgaagaaactgaggcttgggaagagaaagtgacttattcagatacgctctcctagtgagcaatagtttaagtaccttatcaatttttaaagaaagaaaaagaaagttcttttttatatcaactacaaattctcaactctaaataaaagtatttaaaatggcagtctgctcatttcacttaaattaacttatttttattattactaaactattcatcaaaaaagttggaaaatgagataagcaaaagaatatttttaaaagacctaaacctttcatctgttttttctgagtgtgtatttgttctgtacaatacatactattgtgttttctagttttttctcacttaaaattatatcaacagcatcgttccatgtcattaaatattctatgataaactcagaacatgaaagcactataacttatttaacctcttattgttttaaatgtaggttctttgcaactttacattgctgtaaacagtgctctgatgaacatctttggaattaaatgtttgattatttccttagataaatcccttgaagtggattttcaagaggtatgaacaatttttgtaagaggactctttttcaggaatatttgagaaaaaactcaatgaccaaatttctaaatctttattttcctagaaaacttaccaacaagttaggagaaaaacatgcatcatcattaaggaagacttcctcaacagaaggattatgcattattgtgtactaaataaggaaaataaataagctattgttgtgtgcttcttcaattcagttaccacatctcttgtttagaatctgggagaacttcacacactcaagacagaaagcctatgcaattgcattatcattattaatcaaataagaagcacccaggaccatctggaagagatggaccttcaatacaatgatagatagctcttttccttattctgagagtatgtttattgcttactcaatcctaccaacctaataatgcttccaattcacattaagcccaagaagtcaaaatgaggaggttgaactaaacaatctacctgaggctacacaaatcctatagatcagttgtttttgttgaacctcttttaatcaatatctccatttctataggagagatgtgaatttgctttaagcaaattcaaactatgaacatacagattttcaaagcagatattattaaaggtagccaaagcagtcaccacaggcttccctatctaccactatcgctctcttaagtaaatccgtatttctgcccaactaaaaaattgtaaatatggccgggcgcggtggctcacacctgtaatcccagaactttgggaggccaatgcaggcagatcacgaggtcaggagatcgagaccatcctggctaacacggtgaaacccagtctctactgaaaatataaaaaaattagccgggcatggtggcaggcacctgcagtcccagctactcgggagaccgaggcaggagaatggcgtgaacccgggaggcggagcttgcagtgagccgaaattgcgccactgcactccagcctgggcgatagagcgagactctgtctcaggggaaaaaaaaaatcgtaaatatatttatcttcgttggccttatggcttctcttgtaactcctcagctccactgttgcagcacaaaagcagccatagatgatatataaatggatgagcatggctgtgttccaataaaactttatttacaaaaacaggcagccgccagatctagcccatgggaccacagtttgccaacccctgctttaagaaacaagctccttactgtatataaaatatttcatttgaccttcatcgtattagtctcccagggtggccataattaattactgcaggcttgggtccttatttatttatttatttatttatttatttatttattttaaaacagggtcttgctgtgtggcctaggctggagtgcagtggtgtgatcacagttcactgcagcctcaacttcccaggctcaagtgatccacccacctcagcctcccgagtagctgggaccacaggcttgcaccaccagggctggctaatttgttatattttgtagagacagggtctcaccatgttgcccagactggtctcaaactcctgggctcaagcaatcctcccaccttggcctcccaaagtgtggaattataggcgtgagccactgcgccaggcctgacttagtgtcttaaaacaatagaaatttattcccttgaggttctggaggccagaagtttgaaatcagcatgtcagcaaaattgattccctttggaagcgctgagaaagaatgcaattcatgcttttcccttgcttttggaagctgccaaacccttgtcattccttggtttttagaagcataactccagtctatgcctccatcttcacaagggttttctgtgtgtctgtgtctgctccccttctcttctaagaatttagtgcccacgcaaatccaagatgatctcatttcaagattcttactttaattacatctgcagagacccttccctctggaaaacattctgaatgtccaggtggacataatctttttggggtcacaattcaactcactacatccatttacagcaggacccctccaccaaataactcaaggattcacagagtagagctcagggaacacaattcagtgacacacagactcagatgtactctagatgtgactggtccccttcagaggtaacaaatctaccttgcaaaagtccaacagcattattgggtgatggaagttatgtcctcaaattatattttataaaactttccaatgtattagacagtaaatatatgcgcttccaacaacagattcaaaaacaaagcaaacaccacctccaagatcaacaaattctaaagatgttcctaatatataagaatttatgtcccacaccaaagacatgctcagagccaaggatattgatctcatatgagttttccagctgggctgcatgcaccacaatgaaaaaaaaaaaaacatggatagagaaaatatgaaagttgatcaacctatgacatgaagtgataagttcagaaaaatgtctaaaatgtttcagtggacacagttgttcaacaccttaaagatcaatttaaaactcattctcatctttgcagcagatatcacagatatatagatatagatttaaacaactttagtcacaaacactaatatgtctgatttagcttccagaaacctttgtgacctaatcagcaaacaaaacctattgggaactaaggtggaaatttagtcggaaatatttttctcagaaatggaacacattgaaactatctttaacaacgtgtagaaaatagaaacagtagctgattaaatgacttaaaggagagaaaagtcagaattcaacaggaaatcagaaactaaagtgtccacaagacttgtttcctccttttggaagtactatgttcttcaaaatgaaacaggaaaaagaaaattttctgccttcaagtatgtcaataccagaatggctgcttggatccttcatcctttggagacaaaagtatatgtaatgtgaagacttctaagaggacatggcctaactgatctttcctgcagatagcctagagtatccagattggaggcacaccacatcacatacccccaatctgggtgtctagaccagggaattatcctcttgtgccagggaccactacacagcttatttgttctcattctttaatccagccctagcagaaagtatttccatgtgatggatccaggaaacactaggggagggagaagcaatgatggaagagggtaagttcagtgaatctttggtacaaaaggagaagggttgggttgatctggatgttatctaaagaagagaatcatgaactacaaaccagggacaaaagatcattctcttagctctttgtaattccctgtgttccttattgatgaatacctagactgtttccatgttgcaggtagagtttcctctctgacagcccctttaagtagtctgttatgggccgggcacggtggcttacgcctgtaatcccagcactttgggaggccaaggcaggcggatcacgaggtcaggagttcgagacaagccttagccaacatggtgaaaccctgtctctactaaaaacacaaaaattagccaggtgcagtggtgggtgcctgtaatcccagctacttgggaggctgaggcaggagaattgcttgaacctgggaggtggaggttgcagtgagtcgagatcacgccattgcactccagcctgggtgatagagcaagactgtctcaaaaaaaaaaaaaaaaaaaaaaaaaacaaaaaaaaccgtggtctgttatggtctgaatgttggtgctccccaccccaatgcatatgttgaaatcttaagccccaaggtgatagtattaggagatggggactttgggaggtgattagatcatgaaggtagagacctcatggatgggacgagtgcctttataaaagggaccccagagagtgtcttgccccttccaccatgggaaagcacagagagaaggtgccatctgcataccaagaagtgggccctcaccagacaccaactctgccagcgccttgatcttgaacttcccagcctccaaaacagtgagaaataaatttctattgtttataagccaaccagtgtactgtatttgttatggccactcaaatggactaagacatggatggtcccaggatgctgcttcaggaaaatcctcttctatttatttctttctgcctacactaaccttcctcacacatagaccctaaagttccctctcacttagctcccagcttggtgcccccttctctgctgcccctgtatggatgtaactccaactccagatttcgccttgttttgtaaccaagatcactcttgagatgcacaagccacaatctcaggcttattatggtgcccccaaacctaagccaggcccttgggaatgactgaccaagcccacagcaccccaataaccaagcctatttagggagggcaatcagacaattatgagaataatcccaggagctgggaactagaaatctagcctcctctgctgccagtttggggacataaagaagcccaagggataaaataggaagtagcatggtgatgaagaaagaaaaattaaaagagaaattaactgagtccctgtaggtagggagaaagtatctgtagaaagagaggcaagaagctggagtgggcagattcctgataacgtcacagacaaaaatgcatcttcaaaaacacattcatgattttgcatttctagtggtgtttaagtcagccacatgaatttctgctgttaaaccattgagatttggggattaatttattatcaaagcataacttagcttatccagattaatacaataccttagaccttaagctttcaaaaacaaatatgaccgaaggatggtgtgcatatagaaactgccccaatttaacctattggtatccagctacagacctgacctcccctccagataggcttgcattcccctctcctattccctcctcctgaggtggaattattctcccaccctgccctaaagtccccaccatggatggcattccttgtatttgttgcttctttggattttagctcatcttgctttagatttctgctgtgtaccttgcaacccaactaatgtaagttctttgggggccaggaccacctccccaacctcttcatgtcctttactctgatgcattcctagcaggtacacagtgtttgctaaccgcacaattgctgagatgtacctgttgctcttcttacaatcatgtctgtgaagtccctgtaacagctcatcctgtatccttggcagtatcagttctatcaacagaaagtgtctcatacagtttcagaaacaggaagatggtgtgtctcagtttgtggtctttgtactaaacagactaaacagcaaattgtaggataatttactcctcagtgattggcctgtctcaggcccagccagaaagttctgttgtggttgttgttgcttttcttcaaaagtaaattgctctgagaggtcagcacacagtatgatgctaatggaatagtagagatagttttcatgagtctatatatccaaaaaatcccttcaccttccaatgttcaatcatgacacttccctcttatccctttaattagcatgttaattaacagtggctggctgggtgtagtggcccacacctgtcatctcagcactttgggaggctgaggtgggtggatcactgagccctggagtttgagaccagcctgggcaaaacggcaagaccccagcctgggcaatatgacaagacctcacctctacaaaaaaatacaaaaattatctgggcatggtggcccgtgcctgtagtcccaggaggccaaggtggaaggattccttgagcctgggaggtaaaggctgcagtgagctatgatcacaccactgcacttcagcatggttgacagagtgacaccctgtctcaaaaaacaaacaacaaaacaatggctatctctgcacgttgagatttttgtgcctttctgtattttgtaaattttctccagtgaacatttatttttatgatctgattttatgatttataaacatttattttttgccttctccctctaccccccatgcatcctctcccctgcaataaaacctgatgatttcattcagaatacagttaaagacatgctaaaattccctcaggggatatcaaggcctcgtctatggctcagtcccatctgtaagtgaccatcctgactgggggaagtactgtgatgggtgtcttcatccatcaacaaaaatgttcagccaagcaacagaagctaagcaagagaagtcaataggcccctacacttgtacagctacacacaggagtctcagtctccacagaaagttgtcccaaatcaccaacttgggctggatgccagtggtgccccattaacactccgtggtgttcctggtgggagaaccagagtgggcaccagcagctccatgaaccaggactcaaaccggggagcaggaaggaaatgtcttggtcaacacaaccccagcctactcctttccactacctagaaacaggacgccaagagatgatactttccaggtgaacaggcaccaaaagtgtgggattctcagattgagaaccagagaatatttagaatattaacattggaatttagaatggaattcagacatttcagaggctcagagaagcaaaacgatgtctcctaagtcacacagcttgcaaatgacagaggcaagactggactgtaagtcccttgagacttcaagtaaattatgtttcaataggaaagaaagaaaattcagcctatagatatggaaaaacacagcaatattagcagtgtctgtggtcatgaagtcacagagatgcaagattggactctaagtaccttgtcatgcaaaggcatgacatcacactggaaaaagcacagggacatcagaaccaagtgtgcctcaccttcctgggaccagaatcgccccctcctggttccttagcccaggatagatccactgggtcatgtttgggtacaaagagatcatatttagcagcacaaaaattggaagactgcctcctgttctagctaagaagctggatttatttataaataaacttatttataagagtctctgtcctcctaactctaagcaggatgtctgttccctcttctaaattccacttctctcccatgaccctaaggagggtcactaacctttggaacattatccagttgccccctaaatattttctactccctatagcacttaaattcacatgtatattacttattggatgccttctaggactgaattctagtcatatgtctcttttagtaaattgaatcccatcaacttgatgttctaatatttcagaatggctagaacctagtcacttaggaccttttcctcaatcccttcaaatctttggcagccagaggtgacattaatagtttttattatctatggcttttataaatcagattaatcagttgccttccaagttttttttaaggtgactgttgtaaaggagattcattattttcatattatcagatcaggggaaagcaggatccatttttcatcctattgagaaattagcttcatttcaacaatagttttgaacctagaaatgtcaatgtcttcttatcaggaaatctgtattatttcacaggcatggaaggcagcagcccatagactggaagggctggaggcctttctaaaacccctctcactgctgtgcaatattggccatgctgatagatcctgatgcagcatcagatcaaacagaacccctgagatcactcatacaatccaactcctggatgcagactgttgctgatatgccactgtcacctcatatggcctgagacattttaaaaatgcttagttgtagggcagcaattcacccctctttgcccaggacaggagcagtttccaattcttgtactggcataattatcaacatagctttatttaattcactctaatgtcatgatttgggcaatatataataaaatggtcatcctatttactgatcatctagtctgtccacttcttttcatacaaggggaaactaaaccccagggaagtgaatgacagatatcagctcccaaagggaggtgatggcaccaactgaccaccccaaccaccagccagccaggctgtactggcatcttcatgacttcatgactacagacattctgctaacattgcttgtttttccatatctataggctggattttctttttttccaattgaagtataatttacatatttaaaatacacagtttttaaatgttcagtttcacgaattttaactcccaaaacaacatacaaaatatttctgtcaatcctgaaaatttccactgggcccctttcagtcaattctcccaccttgaggaaaacatattctgatctctggccccaccaattattttgcatgttctttgacttcatataaaaggaatcatacagcttataggtctggaaggggtggtggagggaatgtaatcattataaaatatacccagttcgagccttatctgtaataaaggcccactctccagaggaaaatattttgccagcgccttataccagcttggggaagagaattcctcccactctagcctgctgtagccttcctgtcttacctaagagagaaaaaaaatgcaatccacagagctcagagcttcaagaaaatagattgggagtggtgcagccagggataggaaagagaactaaagggaaaagaatatgactgaagaaacacttgtgaagttcacctctctgagacacaggcccactaaaagactgagattcaggttagagaatgttctttctacatataccttactactacaccaaaagaatactagtataaaacaggggcatacagccgaaagagccacaaaaacatagacactgtctgagaaggaggacttacgaaagcccaaagtcaagaggacacaaaaacaaggataatacaagaagctgaagcctttggcacctgtaactacagcacatattaaacacaatccaagtcttagtcaaattaatgtaaattctcacactaaaggcctatttagctcagtttctattacccaaagcagcatgcttggctttcaagaaaaaactataaagcaaaacaaaatgaaaaaaaaaaaaccaacagaatccaaagagacaatcattaggtcagaaataatacagatgttggagtaacaaggaattttaaataactatgattattatgataaggactctaatggaaataaaagacaacatgaaagaacaaatgggtaatgggtagaaatggaaacgctaagaaagaatcaaaaggaaatgctagaaggtagaatggtggttaccaggggctagggaacggggtttggaagatgctggtaaaaggatacaaaattttggttaagtaggaaaaataaattcaagaaatctatttcacaacatagtgattatagctaataccatgtattgtattcttgaaaatcactaagagattttaagttttctcatcataaaaaataagtatgaggtaatgcgtatgttaattagctcaatttagtcatttcacaaggtatatatgtttcaaaacaacatattgcacataataaatatatgcaccttttatttgtccactaaaaataattaattatttttaaaaggaaatgctagaaatcaaaaatgctataagagaaatgcagaatgcttttgatgggttcatcagtagactgaacatagccaaggaaagaatcagtgagctcgaagataggtcaataggaacttcccaagcagaaatacaaagaaaagaaagagtgaaaacaatagtaacaataacagaacgttcaataactctaggataatatcaaatcgtacaccacatgcataattgcaataccaggagaataaaaatgtaatgaaacaggagaaatatttgaagtaacaactgttgagaactttccaaaattaatgacaccaaaccacatatctaggaaactcagagaacacgatgtttttcagttctgctactttatcactgatttttctgtcaattgttgagggggaataaaatgaccaattatgactgtatctttgtctgtttctccatttaaaaggtcaattttatgtcttaatatttaagttatctcattaggcataagtacatttaggaatattacattttttcatgaattggcccttttattattataatatatccctctttatctctggtaatactcttgaagtcactttttaatatattaataagctacccaaactttcttatgcttagaatatggatggtataggttttccacccttctacttttgatctgtttgtatcttcataaagtgtgtttcatgcaaaaatcacatagattgtgtgtgtgtgtgtttatttaatctgacaacaaaggtcttttatgtaggatattcagataatttacatttaatgtaaagtttactggaaacaatatatttgaacagatgcttcatcaaagaagacatgcagatggcaaataagcacatgaaaatatgctcaacatcattagccactagggaaatgcaaattaaaacacaatgaaatgccactacatactcatataaatggctaaaatcaaaaaggctcactaccaaatattggtgaaaacacagagaaattggttctctcatacactgctggtgcaaatgtaacatgatacagccacctcgaaaaacagtttggtagtttcttaaaaagttaaacatatatctactctatgatcttgccatcctattcctttttatttacccaagaaaataaagcatacgtctatacaaaagtttgtgcacaaatgttcacagcgtcttcatttgtagcagccagaaactgtaaataaccaaaatgcccgtcagcagatgaacggataaaacacacagtggtggccaggtgtggtggctcacgcctgtaatctcagcactttgggaggccgaggtgggtggatcaggaggtcaggggatcaaaaccatcctggctaacacggtgaaaccccgtctctactgaaaatacaaaaaattagccgggcatggtggtgggcgcctgtagtcccagctactcgggaggctgaggcaggagaatggcgtgaacccgctaagcggagcttgcagtgagcagagatcgcaccaccgcactccagcctgggcgacagagccagactcagtctcatagaaaaaaaaaacaacacacagtggtatagctctacaactgaatactacttagcaataaaaagagaggaactagtgatatgcccaataacatagatgaatctcaatgtaattatgttaagtgaaacaagccaaacctaaaagagtgcgtaaatactgcatgattgcattcacataaaatttttgaaaatacaaactagagtgacagagagcagaccatcagctgcatgagaatggaagggtaggtgaggagggttgagagggaggattacaagtggacagaaagaaacttttggaaatgatagatacattcactactttgtggtgaaggtttcatgggtgaatactgatgtcaaacttatcaaattttatactttaaatatttgcaatttattatgtcaattatagctcaataaaactctaatatattttttaagttatttggagtccagttggtttcttatccctgcctttgtgtgttctcccccggccactgcactattcctctttcctaggaaaagctcatcactttctgggttatatttgcttcaggtttctttccatccttggctctctgattttttatagtaaagtttatgtaacatacaatttataattttaacaatgtttaggtgtgcagttcagtggaactaagcacatttacattgttttgcaaccatcaccaccattcatctccagaactttgtcatcttcctgagcagaaactctgtctctgttaaacaattcccatttccctctttccccagccctgggcaaccaccattctactttttgtctccattaatttgactgctctaggtaactcatagaaattgactcatataatatttgtccttttttggctggcttatttcacttagcataatgtcctcaagattcatccatgttgtagcatgcgtcagaattcccttcctttttatggctgaacaatgttccactgtatgcaaaccacacgttgtttatccgttcatccattgatggacacttggatggcttctactttttggctactgtgtctgatgggttttttaagttatggttttgtagcttatctggcttattcttctttttaaggtggaaacagtggtattttgcaacctcctattccctgacaagaattagaagtcctctatatattgagttataatctcattttttaatctggcacaaaatcctagaattgaaaatatatccatggcctatcaaagaacaataacaaatcattaaaaaaatccataagtaataaagcctctgatttctaaaagagtttatgtttttcaatgtctgtgatgagatacctgcagcacaaataggtatgcagtcacagctgggtagaaactagaattcacatgcttcgattcttagtctagttgctctcctgcgacattgtgttgtctccatagcattagtgggagatgtaacatcaaattgagacatgatttcaccaattagtccatttttaaataagctgatatgtaagtttaacaaaattccaatagaaatttcaaccagataatggtaatagaaggcagagatcaaggcaaaggccaacttaacttgacaaaatgactattaatctcagcctgaagaataaccatcaaaaaaatccaaaaattattgaaaaacaattagtaatgaatgactagccttggcagatattaaaacatattaaaaagttactataattaaaagcatattgctagtgaatgagcagacagaaaaatcaatatgttctcttcttaacagaaattctgaaagcagatccaagaattcagtatctgattttaatgacattttaaatcagtgattaaacaaatggtattgagaaaaattggctaagcacctgggaatgaatagtaagaatgttacggtcattcagatttccatatctaaagagaggttgttgttgccattctcattgtactgttgtttttaacaccatctctcatgtttccattaatataatctgtcccattgtatttatttttttgtttcattcaccaggaaatttttaccagatcactcaaacatttggataactaatcaccttgtaaacagtcatttacccaaagtaagcaacatttttactggcaaatttttacaaattgggatttctttcataggacaagctgcaatggaaaaacgaaggaatattctttagatattttcaaaactgacatattatttacaaatattcaacaaacacaaattaaattcattctacggggccatcagtgtgctaagtcctgaggatacaaaaatgataaggctcagtcctcccttcaaaacactgtttaacccatcagttatgtcgatagtctgtctgcaatatacgtcaccaatttgctcattgttagatcacattgtttggttgtaataataagagcgcatggggtaaaaatatgaaatactagacaaaaatctaaaattccagaaaaagtattcaatatagattttgcttattagatctgtgcagagattaagcaagatcattagcatctgatacctgtgtctgaggatgttcactctagcagatttgctgaacgagatggatcctcgagtctttcccctctcgccccacaaagcagacacagctggatgctttatcattgctctaccctctccctgaacaaatctgacaagctgatcacattaggccgtgacatacaaaatatggcataattgtagactgtaatcatcacgatgatagctgacttgataagagaggtcaaatcccatttttatatcctgaattcctaaaatattgtttcgtcaaaaaaatcaatttctcatttttctagcgttaacttgaaaagggtataattgatcaagcctaaatcctttatatcacccaggactgtgtgaaaggctcagacccagcaagccacttgagttagggcccggcgaacagcagttgtctccagcatctaacacccatgggcctgaacggcttcaaagcaagaacacgttttatatcccttggttaagactgtggggaaaacacaggctcacggaatatagatgctcagctggctcatttgggttttgtggtccaatttgtggatgagatatttataaaatccggtgattacaatgccatctcattaacattcgttaaatgaaaaccacaaagtgcaggatgagaactccagtctgaggggagaggaagaagatgcatagggaggctggttttgctacctcagcacaggctaaaagagagacctgagacagaggacctctcccacttcctttaagtaagacatgtgactgaaggacaaagggagggaagaggaaggagggtagcttttctatttgtcagtttttttccatctctgtgcaaaccaaatctaagtcaaggccaacccgattttcctatgaattcaaattctccattccttgtaagatttagccaaggagacatctcctccaggatgtctgcctaggctacatttacccccatgagatctttgcatgctcaataaggctgtgtggactggactccactcacagtatttcagcacacagctgttgttcctgccttgtgactgatttctgcccctgtccctgtggggaggagtgtggcttcatagaaccaaaactacagtgtcagaaaagcctggattccagtctcagctcgggcacaaatagtcccagaacctctggtaatattcactttgcaagaaagatacaggggcagggattggtggaggggagattatgcaaattccacaatatgtatctagcaagtgggcacccaatagtagttataattattattattttattaatattgctgacttttctcttttagtcaatctcaaagtcacaggcagtttagataatgcattctatgtagactcagcaataggataattcattcagtggacagttagtaaatactaactaaatgtatgaatgatgctacatccactaggagaacatttcaaagttgggctccatcttcagtgatttatcaaatttagtgattatggctactctgtgtgcagaaactttacttaaggactctgcaaaattttcagacaggtctgtcttccttcttggtcaaatatagaaaagtctagatctccagctttcttctctcctaacaccctactgcaccctagtccccatgacaggcacaaatgcacacacacacacacacacacacacacacacacgcacacatgcacacatacacagagccaagattgactcaatggtgctgactcactaaatggggagccagaaatttcaaaggaatatgcagaggcagagactatcagacttctgccgcactgtcaaccaaaaatcctgacccatgtctgtatcttttgtgtatttgggggtgacaggcagagggccatcagccagaaagaactgtttctgtgactttaattccatggggccttttgtgcttttcttctgcagaccagtgctgcatgtataattaaccctctgcaggctgagtaactgaagcacaagactgctgtccagaagaagcagaagactgaggctgttctcctgagggccaaatagagaccaagaagaggaagttacaagtgtgaggacgattttctaaccctactagcctgaaggcaatagaacaggctgcctcggaaggaaacaaaattttccagatgatgacagaaactgttggagagattcttgcactgggaggaaacagaagtggctagcctctggggttccttaaccttctcagattcggtaagcaggcaccactgaaaggctgggaggcagaagtaaagtgagcacctttgatgcagtagttttggagccattaagaagctactgcacttccctgtttattatgtctaggttcatatgagagagtagattgttatacacagagtcacatcattctattcattaaatgctttcaccaagggacgaagaggtttggagaaaatattttgtttcatttttcagcacaagaatcttaaaagccttgacttgtcacctaatggttccttccttacagctggaatatccttaaactccttgttcgaacttccaaacacacactctccttgtccctacgtttccctctcaattccaccctatgaagcttaagtagaataagcagcagacagcctggtatgattttaaagacatccaaattcccttccacccaaaatctagctcctctacctaattgcaactgtccctgaaaaaaaaactgccatcagagacacgggtttaggtcaaagcaattattcaagaaggaccctggcaagtgcacaataagcaccataaacctagaggcacacattatttttaccaacttcctagcaaagaaagtgtcctgaaaacactggtagcaagaccagaagatctagatgagggcagggttggggaggaggccagtatgcaaggtgaaagatggatcatagagttaagagaatggcaaaaccacgagaagtatcaaagtaagggaggggagatgagtagccaacagttctggagtagagtggaaacacttcctgagtggctattctgttctgagcactgcatattgtactgaaaaacgtcatggcctttgatgtcagccaggcctgtgctcggtcactaactcagcttactcgtggtcaggtatttaagtccatcagctctggttttctcctttgttttgccggggaattaaatgagataactgtgcatgacacagtccttggcacatacatgttattcttctcaccctcccttcaccctacttctacaatttgacaagattgactcttgtctctttgctagaggttctagctgttccagacaaccacactacccaaagcacgttcaatttcaggaaggtgctaaattccactagccctgggcctcaagcaagcatccatctccagaatctcagcagaggagttctgcagccatgctcaatggtgaatactatttttctttgaaaataatgacagggaggcagagcaagatagcagaatagaaggctccaccaattgtcccccctgcaaggacaccaatttaacaactatctacacccacaaaaaaagcaccttcataagagtaaaaaaccagatgagcatacaccgtacctagtttaacttcacattgctgaaagaggcactgaaaaggtaggaaaaaccatcctgaatagtcactgccactcccacccttctccatgcagcagtagtgtggtgtggacagcatttttgcttgctgaggagagggagagtacagcaattgtgaagcattgaaatcactgctgcagaaagtggaatcagactgaactcagctgacacccacccacagacagagcatttaaaccagccctagccaggggagaatcaccaatcccaatagtcagaacttgagctcccactagcctcaccaccacaggctaaagtgctatgggtacctaaataaacttgaaaggcagtgtaggccacaaggactgcaactcctaggaaagtcctagtgctgaactgggcccagagccagaagactggcatggaacatgacttactgtgagacactagctgagacagttaaggaagtgctggaatcaccacctcccctaaccccaaactgcacagatcacagctccaaaggagatccttcttttcttctacttgtaaagaggagaggggagagtgggaaggactttgtcttgcatcttggataccagctcagccacaccatgatagggtaccactcagtcatgaggctccctttccaagccctagttcccagatgacgtttctagacacaccctgggccagaaggaaatccgctgccttgaaggggagaaaaaaaaaaaaaaaaacagccctggcaggattaatcaccagctaacaagagtccttgggccctgaataaccagcagcaatacccaggcactacatagaaggccttgggtaagactctgagactcactggcttcaggtgacagtcagcacattcccagatgtgatggctacagggtgagactctttctgcttgaaaaaagtgaaggaaaaggaaaatgaactttgtttttcacctaggtaccaggttggccacagaagggtagagaaccaagtaggctcttgggatccccaattccagaacttggctcttggatggcatttctggacctgccctgggccagaggggagcccactgccctaaagggtgagagggtgatttccaggccaggcagcatttacaagctgactaaagagcccttgggccttaagggaacatcagcagtagtctggcagtaccctccatgggcctgtggtggtgatggccatggggtgaggctcctctgcctttggaaagaggaaagaagagtgggaaggactgcatcctgtggtttgtgtgccagcttagtcatagaacaccaggtagacgtctaaggtttttgactctagtccctggctctaggatggcacttctggacctaccttgggcctgggagaattgttgccctgaagggaaggacacaggcctagctggcttgaccatctgctgactgtagagtcccaggaccttgagcaaacatacgcagcagcaaaggagtgattactgcaggccttggatgagatccagtactatgctggcttcaggtctgacccagtacagtcctagtggtggtagacacaggggtgcttatgtcactccatccccagttccagatgacttagaacagaaaaacagacttcattagtttgtgagaaagtaagggaagagaacaagagtctctgcctgataatccaggggattcttctggatcttgtccaagaccatcgaggcagtacctctgtgagtctgcaaaaaccacagccttactgggcttggggtgccccccaaaagcagatacagcttagatcacaacacccaagttctttccaatatctggaaagccttcccaagaaggatgggtacaaactagcccagactgcaaagactacaataaatacctagcccttcaatgcccagacacaggcaaacatctataaaaatcaagaccatctaggaaaaaaaaggcaccaggggccaatcctggagaaacagaaatatgtgacatttcagaaagataattcaaatagctgttttgaggaaactcaaagaaattcaagataacacagagaaggaattcagaattctcccagatctatttaacaaagagattgaaataatttttaaaaatcaatcacaaattctagagctgaaaaatgtaattggcttacgaaatatgcatcagagtcttttaatagcagaaatgatcaagtagaagaaagaattagtgagctagaagacaagctattttaaaatacacagaagaaacaaaagaataaaaagcaatgaagcacacctacaggatctagaaaatagccttaaaagggtaaatctaagagttttggccttaatgagggggtagaaaaagagatggtgtagaaagttattaaaaggaataatagcagagaacttcccaaacctagagaaagatatcaatatacaagtacaagaaggttgtagaacaccaaagaagactacctcaggcatttaataatcaaactcccaaaggtcaacataaagaaaggatcctaaaagcgcaagagaaaagaaacaaataacatacaatggagcttcaatatgtctggcagcacacttttcagtggaaaccttacaagccaggagagagtggcatggcatatttcaagtgatgaagggaaaaaaaccttttaccctaggctagtatatccagtgaaaatatccttcaaatttgaaggagaaataaaggccttcccagacaaatggaagctgaaggatttcaccaataccagacttgtcctacaagaaattctgaagggagtactttaatcagaaagaaaaggatgctaatgggcaataagaaacaatctgaaagtacaaaactcactgataatagtaagtacacagaaaaacacaaaatataacactctaactgtgatgtataaactactcttatcttaagcagaaggtctaaacaataaaccaatcaaaaataataactatgacatcttttcaagaaaaagacagtacaataagatataaatagaaacaacaaaatgttaaaaagcagggggacaaaattaaggtgtagtatcttcattagttttctttctgcttctttgttatgcgaacagtgttaagttgttatcagtttaaaataatgggttataagatagtatttggaagcctcaagataacctcaaacttacacggatacacaaaaagtaaaaagcaagaaactaaatcatattggcaaaatgcctataatcctagcattttgggaggccaaggcaggcggactgcctaagctcaggagttcaagaccagcctgggcaacagagcaaaaccccgtctctgctaaaaaataaaaaattagccaggcaatgtggcatgcacctctaatcccagctagttgggaggctgaggcacaagaattgcttgaacctgggaggcagagtttgcagtgagccgagattgagcccctgcactccggcctgggtgatggagtgagactctgtctaggaaaaaaaaaaaatcaccagagaaaatcaccttcaaatcacctgcactaaaaggaagataggaaggaaagaaagaaagaaggaagagaagaccacaaaacaaccagaaaacaaataacaaaatggcaggagaaagtcttcacctatcaataatgacattgaatgtaaatggactaaatcaaaaagatatagagtggctgaataaataatttttttaaaagacctattgatgtgttacctcaaagaaatacactttaactataaagactctcatagactgaaaataaagggatggaaaaagatattccatgccaatggaaaccaaaaaaaagagctatacttatatcagacgaaaatgcattgcaagacaaaaactataagaagagacaaagaaagtcactatgtaatgataatggggtcaattcagcaagaggatataacaattataaatacatatgaacctaacattggagaccccaggtatataaaacaaatattattagagttaaaaagagagatagaccccaatacaataatatctggagacatcaacgctccactttcagcattgaacagatcttccagacagaaaatcagcaaagaaacatctaacttaatctgcactatagaccaaatggatatttacagaatattttatccaacaactgcaggatacacattcttttccttggcacatggatcattctaaaagaacatatgtcaagtcacaaaacaagtcttaaaacttcaaaaaattaataactttatagctataaaagtgtttacatcaaaaaagaagaaaaactttaagcaacctaacaatgcatcttaaagaactagaaaagcaggagcaaaccaaaccaaaaattagtagatgaaaagagataatacagatcagaggagaaattaatgaaattgaaatgaagaaaacaacacaaaagatcaacaaaatgcaaagttggttttttgaaaagctaaaattgagaaacctttatccaggctttaaaaaaaagagagacgttccaaataaataaaatcagagatgaaaaaggagacattataactgatactgcagacatttaaaggatcattagtggctactatgagcaactatatggcaataacttggaatctagaaaaaatggataaattcccagacacatgcaacctacaaagattgaaccatgaagatatccaaaacccgaacagacaaataacaagtaatgagattaaagccataataaaatgtctcccagtaaagaaaagcctgggacccaatgactttactgctgaattctaccaaacattaaaagaagaacctataccaatcttactcaaactattctgaaaaatagagtaacagaggatacttccaaatgtattctacaaagccagtattactctgataccaaaaccagacaaagacacataggaaggaaggaaggaaggaaggaaggaaggaaggaaggaagtaaggaaggaaggaaggaagggagggagggagggagggagggagggaggaagggacagagggaggatgaaagagagagagagagaaaagaaagaaagaaagaaggaaggaaggaaagaaagaaggaaggaaggaaggagaaagaaagaaagaaagaaagaaagaaagaaagaaagaaagaaagaaagaaagaaagaaaagaaggaaagaaagaaaacaaactacaggccaatatctctgatgaatattggtgctaaaatcctcaacaaaatacaagcaaataaaattcaacactatatttaaaaagatcattcgtcataaccaagtgggatttatccctgagatagaaggatggttcaacatatgcaaatcaattagtatgatacattatatcaacagaatgaaggacaaaaaccatatgatcacttcaattgatgatgaaaaagcatttgataaaattcaacatcctttcatgataaaaaccctcaaaactgagtataacataactcaacataataagagccatatactacagacccacagctagtatcatactgaatagggaaaaactgtaaaccttttatctaagatctaaacatgacaaagatgtccacttttaccactgttattcaacatagtactggtagtccttgctagagcaatcagaccagagaaagaaataaaaggcatccaaattggaaaggaaaaagcaaaattatccttgtttgcagatgatatgatcttctatttggaaaaacctgaagactccactgaaaaactattagaattgataaacaaattcaataaagttgcagaatacaaaatcaatatacagaaatcagtaacatttctttttttttcttttttttattatattttaagttctagggtacatatgcacagcatgcaggtttgatacataggtatacatgtgccatgttggtttgcagcacccatcaactcatcatttacattaggtatttctcctaatgctatccctttcctagccccccactccccgacaggccccaatgtgtgatgttccctgccctgtgtccagctgatctcattgttcaattcccatctatgaggagaacatgtggtgtttggttttctgttgctgtgttagtttgctgagaatggtggtttccagcttcatccatgtccctgcaaaggacatgaactcatccttttttatggctgcataatattccatggtgtatatgtgccacattttcttaatccagtctatcattgatggacatttgggttggttccaagtctttactattgtgaatagtgctgcaataaacctaagtgtgtatgtgtctttatagtagcataaaaatcagtagtatttctatatgtcaacagtgaacaatctgaaaaaaaatttttaactaatcccatttacaatagccacaaataaaattaaatatctaggaattaaccaaagaagtgaaagatctctataatgaaaactataaaacattgatgaaagaaactgaaaaacaccaaaaaatggaaagatattccatgttcatggatgggaagaatcaatgttgttaaaatgtccatactacccaaagtgatctacagattcaatgcaatccttaccaaaatatcaatgacattattcacagacattgaaaaaacaatcctaaagtttacatggaaccacaaaagaccaggatagccaaaactatcctgaacaaaaagaacaagactggaggaatcacattacccaacgtctaattatacttcagagctacagtaacaaagtagcatggtactggcataaaaatagatgcataaaccaacagaacaaaacagagaacccggaaacaaatccacacacctacaatgaactaatttacagcaaagatgccaagaacatattctggagctgagaaaactggatatccatatgcggtagaataaaactagacctttatctcttgccatatacaaaaatcaaatcaaaatggattaaacacttaaatctataacctcaaactatgaaactagtacaagaaaatattgaagaaactctccaggacattggtctgggcaaaaatttcttgagtaataccccacaaacacaggcaaccaaagtaaaaatggcaaatgggatcacatcaagttaaaaaactgcacaggaaaggaaacaatcaacaaagtaaagagacaacccatggagtggaagaaaatatttgcaaactactcatctgacaagagattaataacgagaatacataaggatgtcaaccattctataggaaaaaaatctaatgatccaatttaaacacgggcaaaatacttgaatagacatttctcaaaagaagacatacaaatgacaaacaggcatttgaaaaggcactcaacatcactgaccatcagagaaaagcaaatcagaactacaatgagatatcatctcaccccagttagaatggcttatatccaaaagacaggcaataacaaatgctggcgaggatgcagagagaagagaaccctcatacactgtcagtgggaatgtaaattagtataaccactatggagaacagtttggagattcctcaaaaaactaaaaatagtgcttccatatgatccagcaatcccactgctgggtatatacccaaaagaaaggaaatcagtatatcaaagagaaatctgcagtctcgtgtttgttgcagcactgttcacaatagccaagatttggaagtaacctaagtgttcataaacaaatgaatcaataaagaaaatgtggtacatatacacaatggagtactatttagtcataaaaaagaatgagatcttatcatttgcaacaacatggatgaaactggaggtcattaggttaagtgaaataagccaggcacagaaagacaaacatttgcatgttctcacttatttgtgggatctgaaaatcaaaaaaatggaactcatgaagatagagaatagaagaatggttagcagagactgagaacggtagttgggagatgggggtgagaggaaggggaagaagggtatagttaatgggcacaaaaataattgttagaaagaatgataagacctagtatttgatagcacaacagggtgactatagtcaataataatttaattgtacattttaaaataactaagagggtataatttgattgtagcacaaaggataagtgcttgagggaatagagaccccatcttccatgatgtgacaattatgcattgcatgactgtatcaaaacatctcggctgggagcggtggcttaagcctgtaatcccagagctttgggaggccgacgcgggtgaatcacctgaggtcaggagtccaagaccagcctggccaacatggtgaaaccctgtctctactaaaaatacaaaaattacccaggcatggtggcgcatgcctataatcccagctactcgggaggctaaggtgggagagtcacctgaacctaggaggtgaggttgcagtgagctgagattgtgccactgcattccagcctaggcaacagagcgagagtgagactctgtctcaaaaaaaaaaaaaaaaaaaaaaaaaaaaaaactcatgtactccataaatatatacacctactatgtacccacaaaaatttaaaaagaaaataatgaagcactgcagatggaaccagccattatacaaacaagctaacaaccttttgggaaaccatgtcaaccagacagtgcaatgaaccagccagtggggatgaaaaggtatccacaaggtttactaaatgactgcctttcaagcagtctggactgccttgaaaaggagagaagactggcccaaagactgcataagtttaaacaaatcctcagatcatcaccacaaggctgatgtcaccaaggctgagtcaccatcatacgtgattccagaagctagggctgtaagaagtcactgcactaatgtaaaggcaagaagaacacatgccaaacataatgtctaagcagctgaaggtgctgtggcacttcctgctatttacccaggccaattatgtccggttctagaagaaaatgggatgaactagaataacttctccagtggtaaggagtctggattactaacagttcaagtataaatgtctttatccagttgaatggacctcattcattccatgaacaaatatttatagagcacctactatgtgccaggcactggtgtaggtgctgaggatacaactgtgaatcaaacataagctctgacctcttggatttcacatcttagcaaggagacagacaataaacaaagacaaaaagaaagaacaaagggagggaggcaaaatgtatcactatctaaaattaaaagctggggtcatatgttagagtgactaggtgacctgaatgacaagaagccagccatgcaaacatctgggtgacagctatgagttcttgcctcaggtttcacagaatcatgtacttttcttactgaaagggacctcagtgatcaacttcaacactccattttttatatataatgaaattgagactcaggcaagtagtatgatgtctccaaagccactctgaaaattacacagggacttccctgtttattttcgagaaggcttaaacagacaaaatgataattattcaacaaacatgtattgagccagtacttttttttttgagccctgtaatgaccactctaaattcttcagaggaaaatgagaaatacacaagtgaagtaagcagagaccccttctgtactaactgcaggcctgaccatttgatacaaagtagcaaggaggaagatttacatgggtgattcaccccagaaggctgaatagaggaggtgggatgagtaggattttgataagcaggaaaggcaggagggtgatcccatcaggagaaacatactgaatcagtgcagaaaagacaaagaatggggcggggaggactcagggagtccctaggaaactagggagtagttgaggagggatggggcatcaagactggggatggtgacacctcaaacacagagagagagttgggggaagaggagttgtaagacatataaatgtcaccaggctcaccctttgcccatcactcagtacctatcaccttccagcttgcagaggtgctaacatttgaggtactcaaactcatcttgatccttttttctcatccccttcactttttcttcacaacaggtgctgcactgggtaccctatacatatcagctcaaaataataccagttatccactcattcattcagcacttcatgcctcctatgtgtcaggcatgaagctaagcactttacaaagaatatgtcttgtaagccccacagtaaccctatgaggtaggtacttgtcattacaatcttagctagcaaactgaatctcagacaggttaaataagttgcctgaggtcactcagctggaagacagtggagctaggattttaatctctgtcttttgaactccaaagcccaagcactctctaatttttactatgaaaatattcaaatacaaaattatatagaaagcaaaatcaaactttgcctccttcatcatctagccatcagccagtcctacctgcttgaagactagaggtattttggctccctctgaaattctctttttacctcttgtcaaatttcccagacatagctcaactatggacaacttgtaccaacatttgtttcacaagctattactaagtcctccacacaggaaatatggaacgtatttccacaggtttttgagcctttgcaggtggcatagtattatcagtatcacatctttctgagacacacaaaaaaagaattggttaaaagatggaagaggaacaacagggatgaggcatgagcaagttcagaggacacatgtaagcttcatgaacaggtggtccaggcccacatatcctccacccctgttgccccagcaccatttcttcactgtgagggaggccttcaggaccagctgatgtaggagaaaaaaggctgagttgctgctgcacttcaacacactcttgggtgacccagaagactgcaatgaaggcaaatcttcccagtagtcagagcttcaggtgttgccccatcacccaccttacgtgggaagataagtggtccaaggctaggctatacaataactcatggacaatggcctagctggttattcagagggttggcagatcatttggaagactgaggacaaggaggtctaggaagaggcatgtgaataacctataggaaaagaagatgaatgataaaaatctttatattatttgttgattctcattacatagcatctctgatggaagacaccaaacaaccaagttgacagaatgaattggccaactgacttcagcctattttttttcatcagccactccagtgctgggatggtgcccgatcacatttagtagcagtgattgcacgaatgaagcctatgcatggccccagcttaccaaagctacttgctgctgctgctgctgctgcttgccactgtcatcaccaaatgtccaccctgccagcaacagagaccagtgctgagcccccagtggtggtaccgtccctcaaagagatcaaccaggcatttagtgtcaagtcaattacattggacctcttctactctgaaaagggcagcaatctatcttggctgagatagacacctgttgcagctatgtgttttccttttctgctactgctatccaatgatttgcaaggttttaatgtgccaacatgggattccacaaaacactacctcaagaccaagtgacccattttacagcagaggtagtatgacaaagggatacgtgaccatggaatccactggttctatcacatactgcactactgagaagacactggcctgaaagaccagtggcatgccctcttaatgatacagcaaaggggccattttggatattataccctggaaggatggtgcactatcatccaggactcaacatataccctaaatgacctatatgattctgtgtccccagcaggtagaatacataggtccaggaaccaagagatggaatgatttaccaatactgcaaccagtaatcctcctgagatatttgttttctatccactcaaggttaggctctttagatctaaagatcctaactcccaaaagaggaacacttgtacctggggacatagttaagagtccctttgaactttaagctacaactgccactcaattactttgggatcctcataccaagaaaccagcaataaactaaagaaatcaaccaaccaactagcaagggtaatcgaccctgcccatcaggaggggcttagcttctgctacacaatagaagaagggaagaatatgcttggcggtcaggtggtccactaagaggtctcttgatgttcccatgctcaccacttaatggtaatacacaagaatagcaaccatagactgagaagggcacagtaacttggggctcaggaccctctgggatgagggtttcattacttccagcaggtaagttacccagtgcagcacagggaatagccagagtggaggggaatgagtgtgtttaaaaaaaaaggaggggagcagtaataagccttgagaccaaactgcagcagcaagcgctgtagtatttcttactaaactttcacttgtaagctctcaggaaacgagaccaaccaaaattcaatagaaggcattcccaaacatagtgcagttattataagaagtaagtgggtttgagcgacatgagggctggatggggcacactaaggagatctccacccagatcctctcttcagcacagacacactcaaccccttgctgctaagaatactgagtgctggggactcacagctgagttactcaccagcagttacctcagttgcagggaactgcctcatccaggatgacggcccctcctaggggacagcctatggccaatgactggcttatgaagggatacagacgtctgaccacgtgcttcaaacaggattagctccaagaggctgtcccagctccaaacttctgtgtagagccacctgagaccttttttgccacaggaatacaggtcagttgcttcatcagcttacaggtgtatctcctgaaaacacctgcaataactttctgtgtcaagtctatttcaactctgtttccaagtctgtttcccagtacacaatctcaggcagcctcactcacacccattaccacatgccccaagcagaacagcactggaacagagagcaggagagtttcttgtcttggccccatctcctttaagttctctgtttattcaaacctacctaccctctcaaaacctaggtgggtaatcctccctccatgcctcattttgaatctatgagggtacagagattattaaatatacactttgcaaaacactctgttccttctaacaaaaaaggccagtaaagacagtaaggcaaggacatttctgacattttaatgtcagaaagttcacatgctggtgtcatcgtagactagtccatgagaaagggataagaagactaggtcattaaagtcaaatgactctatgaaggtcatttaacctccatgaccctgttttctaatctattttaaaagcttgctctgactaccctcaaaactttcatgagactcttcttggtaaagacaacaatacctacctcatgggtttcttagaaagactagacgaaatcatatattacaatatctggcacatggtgaacacaccacatatggctaaaatcaaatgataaaatgcctgccaatgactttgaaaactcgaacatgctacaaaaatgacaacaattatgattacagtgcaacatatttaatatataatgttttacattttttcagaggattggccttgtgtccctaacatgaatacagttcctcttttccgtttcttttaactacaaagcaactagtgcagtgtatgccatttggtaaatgcttaaaaccttttgcctgacttgcaaggcagggatcagtgagtaataccatgccttggtaacctgtcactactagaaagtgcttctgtaatgttctgtggaagagagattttttattttttgcattagactggaaaaggggagaaggagctacatttccccaaaccacctgagacatcacccaatgatttcaaatgcacttctatttgtctgaaagtattctattcaagagttacttctaaccacctgatatttcagggtgctggtgtatgtgcacccattttcctttgcattttattaaatgagaaaccaaggattgtatctagcctgtgctcaaactttttaatggaatcaaaatcctctaagattatcttaaatccggttaatatttttaagtgggacctgaatttagccaaatagctgggtggtttagaaacatgtctatctgtctccttaaagtgattccatgaatttggatctctgtgtcactgatccacttcaatgttggcatatatattatgaggaaatacgttgatagaaattcaagaaaccctcaaataagtgccagcatatctctagataaggatattttagacagccctaagctatgtattcccttcccatgagtgaggctttttcccttatccctcatctccctctctttatctattattagtgtcctaatctctgcatcaaccaaacagctttctttcccagagttatctcaaatcttactttctactgccttcctaatacacattaatttccagaactcatctcacttgcaaaacttggaatgtccctcatataaataatcactgcaaatgccaggccaggagctttgttcagcttgatttctccccagaggactgagtccaaagcatgcgctgccacctgttatcatggaaaaagttgtaatcattatagaataactacctaagataggccgggcgcagtggctcacacctgtaatcccagcactttgggaggctgaggtgggcggatcaagaggtcaggagatcgagaccatcctggctaacatggtgaaaccccgtctctattaaaaatacaaaaaattagccgggcgtggtggcgggcgcctgtagtcccagctacttggtaggctgaggcaggagaatggcgtgaatccgggaggtggagcttgcagtgagccaagatggcgccaccgcactccagcctgggccacagagcgagactctgcctcaaaaaaaaaaaaaaaaaaaaaaagaataactacctaagatactctgtagcatttggtgtttgaatgacaggtctctgtttcacagaggaaacatactacagaatttttttttcattcattcctattataaaatgttgtttcttcacattaatgaactacattgatattaccctggaagacctataagattcactcatacttgattaatttgagacactgatccccataaatcacagcagccatatctcaagctgacttttgcatagaacctgaaaacatatccttgcagagttccattccctgagttactgctctatgccagagcaacatgatggaagcattagtgctaaagttttgatagttgagtctatgttccttttcaggatagtgcctgttttttcataagatcttcactggctgaccttaaaaaaaaaatgagaagaaacagaaatttcagatgccatggaaagccaggtaaagggtcattttttagcaaaaaattcagaaactctatcagaccatcccatgtaaatggtcaattttatgtcaagcaaattcttcaatcctcttcaatgctgtgtgtaccaacatgcaaatgacccagctgtataaacagacagtggctcatgagacttaaaggtttcagggctaaagagaaacactcctctcactagcaagaccatgagatgagacacagagtccaagcacccaccatgctgctgtccaaggtcttcattcctgcttcctcctcctcttatccagtctccagatgaatttcacatctgatcctaacacacttaaataacagaacttgtaacagaatgaccatatagagtggtaattagaggcatggtcaggcagacctccattcaaatcccagcttcgccatttattagcagtatgatcaaattacttaacctaattctaagtttccctttctgtaaaatgaggatagtagcagtttctatctcataggtttgtcgtaaggattaaatgagatcaaacaggtaaagtcattgcatgtgctgtcttgtcacattcagctttgcatcccaatgatcagcagagtaatttaaaattttttacatcttgatcaaatgaataaataaatccaaaagagagagataattgaccaggaagcatgagaactatttctagtcctgtcccagacaagtgacttagcctctccagatgttatatacctcattagtgaaatggggataagaacacacagtatgggtttagtcattgcattgttatagccaacatttggccactcagaaatctagccaccaccaaaatatgccagctgcaaaattatcatcagtcttgtcttgtctgactctagtcttcaacatggctgagggtgaggcagggggatccctgagccaagaccaggaactggaatagaataagtaataattgtccttgctttgccacttaccagctgtgagtttcagtagcccattgacctttcctggcttcagtttcttcacagataaaccatgaataataatgttttccctgtattctaccccagtgagttgtagtgacacataaatgagataaagtataacataatactttgaaactgtaaagtgatataaaaaagtattattattaaatttccagcaataggttcttatcacagccatagctggaaggatgctattcaaacctagagatccatttcttctctcactctctcgatctatttctctatctatatactaactacttatctatctatctatctatccatctctgtctcactagataagggaaaagtctttcaattagagattttttgcttcagagttaatgctatatgagttgtaaattatattcaataacaatagtagtttgcattggtagagtctccttcctattgcaaagcactttaaaactgtcacaagctggaattctcacagtaaaatctgtcttgtcacattcagctttgtatcccaatgatcagcagagtaatttaaaattttttacatcttgatcaaatgaataaataaatccaaaagagagagatagttgaccaggaagcatgagaactatttctagtcctgtcccagacaagtgacttagcctctccggatgttatatacctcattagtgaaatggggataagtatagcttgcctcctaatgcagaaagctggaagggagtataaatcctcttattctatagatgaaatgaggataagtgactttatggcctggagttggtaaatacttaacataaatatatgttacaccccacaacacagtattgttttgtgtaatcagtgttcacttatttacccacgtatttgttcttcccaatgctcttcactccttcctgcatttgtttccagatatcatcattttccttctgcctgaagaactctcaaggtctgagagcaacaaagtctctcaattttgtttatctagaattgtatttcttttgccttcacatttgaaggatattttttcactggatataaaattatagttcagcttcttccctcagtaccttaaagatgccattccattgcctctagctttcatattattattctgccaattatatttttggattatttttaagcattgtattttttcacaggctttctgtaaaatttgttagaagcttattatgagagttttctttgtatttatcctttttgaagatcatagaggttttaaaactgttacttgatgcatttcaactgttttggaggatttggggaattatgtcttcaaatattgcttctatcccattttttccctcattctattctggacctccaataatacaggtattaggccttttcattgagttgagtaaattttttatacattttcctatatttacatcctttttccctttcatgctttagtgtaaatgttttctactcaccagtcttccggctccccaaaagagtaacttggacgtctaccatcacctgccaataatgaggcagtcttcctactcttccctgggaaatgtcagaacaagctaactaatgtttaaataaaatccaaagtctcatagcataatactcaaaacatccatgtttcagtgaaaactcacttacacaaataaccaagaaaatatcaacattaattttaaaataagagcaatagtcacatcactaagatgacagagatgttagaactgtataacaaagatgttaaagaatccatcataactgttcttcactgagcaattataaacatgcttgaaacaaatgaacaaatcacctcaagaaagaaacacaagataatcaaatggattttttaaaactcagtggatgagctagacaacagagtggagtgggtagaggaaagaatcagtggaacagaagataaaacaatagaaattacccaatctgaataacagaaaaaaatagactggagaaaaataaacagagccctagggatacatgggactaaaacaaaagagctaaaaatcatataattagagtcccaagagataaaagggcagtgctgaaaaagtacttgaagaaatacagcaaaaacttccaaatttcacagaagacatacaccaaagattcaggaaacatggtaaaccccaacaatataaacccaaagaaatccacactaagacaaatcatagtcaaacttctgaaaactaaagataaagaaaaaatattgaaagcacagaaagagagaaatgatatcttgcctatgtagaaaatacaactcaactggcagtggatttctcatcaaaaatgatgggagccagaaaaaaacatggcacaatatttttcaagtgctgaaagaaaagaactgtcaacccagaattccatatctgcataaaatatccttcagaaatgaaagataaatcaaggctatctcagatgaacataaactaatttttttgccagcagaactaaccaaaaggaatggcttttaaaaatcctctaagtagaaataatattagaaaagaaaaaatattggattatcagaaagaaatatacaaaaagcaaaaatatgaataaatatactaaatttttcttctactcttgatttctcaaaattatggttgacggttgaagcaaaaattataacacagtctgaagtagtattaagtaaatgtaaatgaaatattcaaaacaaatataaatggggaaggtaaggtatgtaaaacaaagtgaagtttctacacttcatttgaactggtaaaatgtcaacaatagcaggctgtgataagttatatatatgtaatataatacatagggcaactgccaaaactatataaagatataaattttaaaatgtagtagataaatcaaaatagaattttaataaattttcaagcaacacacaagatatcaggaacaaacagaaaaacagacaacagaaagcaaaaaattaagcacaatatatcaatagttacattaagtgtaaataatctaaatacatcaattaaaagacaaagattggatgagtgggttaaaaaccatggctacaggaattcgagtccaacatggtgaaaccccatctcttctaaaatgcaaaaattagccgggcatggtggtgtgtgcctgtaatcccagctactcaggaggctgaggcagaattgcttgaaccaggaggccgaggttgcagtgagccgagattgtgccactgcactccagcctgggcaacacagtgaaactctgtcaaaaaacaaaacaaaaccatgacctaactatatgctgctgtctacaagaaaaacaattcaaatattaacataatgaaataggttgcaagtaaaatgatagaaaaggatatatcacgtacatatcaatcaaagaaagcagacatggctatattaatatcagataaagtaagtttcagagcaaagaaaattaccagcaggaagaacattacatcatgataaggtcaatttaataggaagacatagcaatcctaaagagttttcaccagactcagagctgcaaaatatgttaagcaaaaactgacaggactgaaggacaaatagataagtccacaattatatttggaaatgtcaacacctctccctctctcagtaattgatagaacatctttttaaaatcagcaaggatacaaaactcaataacatcatccaccagtaggaactaatcagcacttgcagaacacaccactcaaaaacaggaagtatatacattattttcaagcatttatggaacataaaccaacatacaacatatgatgagccataaaacaaacctcaaaaaatttaaaacaattggctaggcgtgatggctcacacctgtaatcccagcagtttgggaggccaaggcgggtggatcacctgaggtcaggagttcgagaccagcctggccaacatggtgaaaccccgtcactactgaaaatacaaaaattagccagcattgtggcaggcacctgtaatcccagctactcgggaggctgaggcaggagaatcgcctgaacctgggaggtggaggttgcagtgagccaaaattgcaccactgcactccagctgagcgacaagagcaaaattctgtttcaaaaaaaaaaaaaatttttttaaacaattgcaaagatagagtgtgttatttgtccacaaaggaagcaaactagaaatcaataacaaaagtaacaggaaatcttcaaacacttggaaactaaatgatacacttctacacttcattaaggagtccaaagaaaatttaaagatacacagaactaaatgaaaatgaaaattcaatatatcaaaagatgtaggatgcagataaagcagtgcttacagggaaatttatagcactaaatgcttacattagaaaagaggagaagtttcaaatcaataatctaaactcccatcccaagaagttgggaaaagaagagcaaaataaacccaaagcaagtagaagggaggaaataaagagcagaagtcaatgaaattgaaaacagaaaagcaataaagaaaatcaatgaaacaaacagctacttctttgaaaacagatcaataaaattgacaaatctttaactaacaaagaaaaagagagacaaggtacaaattcccaatatcaggaatgaaatagtggatatctcttcagaccctgcagaaatcaaaagtataataagaaaatcatatgaataattctacaccataaattttaaagcttagatgaaatttaccaatgcctcaaaaagcacaaattagcatccagtatgaaatagattgaatagtgctttaattattaagaagattgaatttacaagtttaaaattctcaaaaaagaaatctgcaggtctaggtgatttcatcagagaattctactaattgttcaaagaattaacatcaattccttttttaatttttttatttttttaattgacaaaattatatatgtatatggggcacaacataatgttttttgttgttgttgcttttgtttgtttgtttgtttgtttttttgagatggagtcttgcactgtcgcccaggctggggggcagtggcgcgatctcggctcactgcaagctccgcctcccgggttcacgccattctcctgcctcagcctcccgagtagctgggactacaggcgcctgccaccacgcccagctaattttttgtacttttagtacagacggggtttcaccgtgttagccaggatggtctcaatctcctgaccttgtgatccgcccgtgataatttttgtgagccaccatgcccggccatactgttttgatatatgtatacattacagaatgggtaaaccaagctaattaacatatctattacctcacatacttatctttttttgtggtgagaatatttaaacatctactcttttagtaattctcaagtatacaatgcactgttattaagtacagtcaccatgttgtgcaataggtctccagaacttattcttcctaactgaaattttgtatcctttgaccaacacccctccagcccagcctccacaagcccttgataaccaccattctattttctgtttctgtaagataatttttgtagattccatatttaagtgagatcatgcagtatttttctatgtccggtttatttcacttagcataatgtcttccagatcatacagtatttatctttctatgtctggtttatttcacttagcataatgtctttcagatttatccatgtcattttatccatgtcacacacaaatggcaggatttctctcctttttaaggctgaagagcgttccattatatacatttctccgcttttttaggatgaatatgtatatatatattcacacacaaatgcatgcacacacacacacagtatatatatatatatatatatatatatatatatatatatatatatatatatatatatatgcgtgtgtgtaagtgtgtgtaggtatatatatatagtagtctcctcgttatccacaactttgctttctgtggtttcagttacccacagttaaccacagtccaaaaatattacatacaataagatatttagagagaggtagagaaagatcacatttatataacatttatttaagtatactgttatacttgctctattttattattacttactgttgttaatctcttgctatgcaaaatttataaactctatcatagatatgtatatataggaaaaaacatagtatgtatagggtttgatagtatgaaaagtttcaggcatccatccactggaggtcttagaatgtatgccctgcagataaggggggactactgtgccacattttctttatccattcatcagtcaatggatccttaggtcgattctatatcttagctactgtgaataatgctacaataaacatgagattgcagatatccctttgacatactaatttcatttcctttggatatatattcagaaatggaattgctggactatatggtcattctgtttttaattttgtgaggaatacccattttttaaataatggctgtactaatttacctttccaccaacagtatagaagtattcccttttcttcacatccttgtcaaattttgtctcttgtctctttgataatagccatcctaataagtgtgaggtgatgaattaaacaccaattctgtgaagtctcttcaagaatgagagaacaactctcaattcattgtatgaagctagtattattctgatatcaaatacagacaatgacaatataaaaaaggaaaactacagaccaatgtcctcatgaatttagatgcaaaaatcctagcaccaaaatatgagcaaatggaattcagcagtatatgaaaataattagacaccatgaccaagtggggtttattccagggataccagcccagtccaatactagaaaagcaagcaatgtaacccaccatattaacaggctaaagaagaaaaattacactattatatcaatcaatgtataaaaagtatttgacaaaattcaacctccattcatggtaaaactcttacaaaaataggaatataagagaacttcctcaacttgataaagagaatctgcaaaacccaacagctaacattatactaaatggtgaaagacaatgtgtttgcccctaatattgggaacaaaggaaggatagtcactgtcaccactcttattcaatatagtactagaagtactagccagtaaaataaggaaacaaaaaattatgcagatcagaaaggaagaaatactttgatccttatttgcatgtgtctaaatgtttatatagaaaatcacaatgaatctattttttaaaattagaactaataagtgagttcagcaaagttgcaggagacaaggtaaacacacaaaaatccattgtatttctataaatagcaatgaatatatggctatcaaaatgttaaatataatatcatttataatttttatcacccaaaacaaaattattggggaaaatgtaacaaaatatatataggacttgtatgctgaaaactatgcaacactgatgaaagaagatataaataaatgaagacacatatgtacatagattggaagactcaacatactaaaagatatcaattcttccaaaactgatatacaagtttaacataattccaaccaaaatcccagcaagatttttgtagatacacacatgattatcctcaaatatatatggaaaggtaaaagaataaaacagataaaaccattttttaaggaaagaataaagtgggaggaattagtctacctgatttcaagatactgtctagctacagtaatcaagactgtgtgacattggtgaaaagacagacgcatagatcaatggaacaaagtatggaacccagaaacatacccacatatttatacccaattgatttttcacaaagctgcggacacaattcaactgagggaaagatagccttttgaatgaatggagctgaaacaattggtcatccacaggcaaaaaataaaataaaaaaagacctaaacttcacaccttattcaaaatcaactcaaaatggatcacagacttaaatgtaatatgtacaactaaaaaactatataactacagaaaaaaatgtgagaacatcaggctctaggaccaggcaaagtgctcttagccttgaaacagaaagaatggtccataaagaaaaaattaataaattggactccatcaaaattaacaatgtttgttctgtgaaaggtcctgttaacagggtgagtaaacaagctgcacactaggaggaaatatttgcaaatcacacatctgacaaaggactactatctagaacataaaaagaattctcaaaattcaacagtaaaaaacaaaaacagtaaaaaaaaaaaaaatccaattagaaaatgagcaaaggtatgaacatttactgaaacatatacacagatgacaaaaaagcacatgaaaagctgtccaacatcattagtcactagagaaatgtaaattaaaactaaaataagacattatatacttaccagaatgactaaaatgaaaatatcaatacctaagctggcaaagatgtagagaagttgaatcacatattgctggtgggaaagtaaaatggtatactctggaaaaaagtgtgtaatttctttaaaacatgaaatatgcaactaccaaatgacctagcaactgcactactgggcatttatcctagagaaatgaagacttatattgacacaaaaacctgtacataagtgttcatagcagctttattcataagagccaaaaactggaaaccacattcaaatgctgaatagttaaacaaactgtggtacatttgtgccatggaatattagccataaaagggagcatattactcatatacacaacaaactagatggatctccagagaagatgaataaaaagccagtctcaaggggctacatactatatggttgcacttatgtaatattcttgagacaacaaattatagaaatggatagtagactagttagtggtttcctatggataatgagggaatagatatgtgagggaagtgagcatggctataaaaagtcaatgtgggggatccttatgatgatggacatgttctgtatcttgattgtattgatggtaatatcctgattgtgaaattgtacttagttttaaaagatgttttcattaaagaaaactggataaagtgtacaagggatctctgtattatctcttacaactacatgtgaatctacagttatctcaaaattaaaagtttaattaaaaattgggaagtacagagttaccagttactttgatgggaagactgtgagcgcaattttgggaagtagaaatcaagagtgcttagacatgttgagttttaggtcattgttagagacccaaatatcaagtgagcagttggatatatttgactggagttcagaaaatagttctggactgtatatgtaaacatgaatatcattagcaaataaatgttacttaatgctatggaagatctccttgcataaggaggaaaagaatatagaatcaaaacaagagaaaatctaagatcaagccttaaaaaattccatcatttagaagtcaaaggagacagaactagcaagtctggaaagactgaccagagatacaagcagaaaagcatgttgtcacaaaacaacaatcgaagggtgttttgggccaggcgcaatggctcatgcctgttaataccagcactttgggggacagaggcaggcggaatgcttgagcccaggagtttaagaccagcctaggcaacatagcaagacctcatctctacaaataataataataaaaaaaacatagccaggcatggtggcaaacctgtagtcccaaatactctagaagctgaggtgggaggattgcttgaacccaggaggttgaggctgcagtgagctatgatcatgccactgaactccagcaagaccctgtccaaaaaataaagtgtttcaagaatgcaaatgtgttgtccacaaactgtagttgagaaaatacaagataatgggaccagacttataacaatgaaattgcctagtctctgatttgcatgatctaatgcaaaaccgtctgtgcaattttaagtatttttgtttttctcatttttttttttctggtcataggagaaggagcaaaatcataggctctctttttggacctagtttcattacctcaactgacactacttcctaagaaaaacattccatttttttaaggcagggcttacacttactctccttcatgttcatttattggactcaacctctgctgtcctctgctattcttctaccctcactatctcctaccattctgtccctgctcacactgtgtgcaaacatcctaagcacatgcctcactggtttgttcttctcaatctcttttggtactctccttacatttccaaacagttccagatccttacgttttccctatttagatacactctctagattatctcaaccagtcctatggctttcacatatcacctatacacaaacaactcttaaatttctgtctctagccccaacttctcaccttgcctcctgacttatatccaattgcctgcccaatatctatctcctcttgaatgaataatagacacttatagttaacatgcacaaacacttgatttttccccattcccaacttgttcctctttgtcttccccagctttcatggagctccctaataaatggtgtgatagttttaaaacatggtcccaaattctttgatgctccaatgtcccctcctccttgaatctggaatgggcctgtgatgaattctaaacacagaatatggtagaagtgacgttatgtgacttctgaggctaggtcataaaaaaccatgcagctttttcctggttgtcttagaatgctcattctatggacacttcctaatggaatactccttcttaaagcccagccatcatgcagtaagaagcccaagccaatggagatagcaaaaatgattgttgtttaagctcactactttggggcattttgtagtgatagagaactggaactgatggaacctgatggtagctttattgtttcaatttttgagaccagaactctaaggtcatccttgacgcctttccttttctcacattccatatccaaaccattagcaaatcctgtcagctctctcttcaaatatgccccaagtctgaccaattctcaccaatctgaccaattctgaccagtatctcatctataaagtgaatctctcctaggcagagattcttggtgggaaacaacagaaactgactcgagctaattttcacagaaaaatattaggcaaaaggaacccagattactcacagaatagactgaaagggataagaaccaagttcagaaaaggatctgaaatcaatgggggttaggtgcaagaaccacagccagagaaccagctgggttggcgagctgcctctgttggacacagaacgcaccaccacaccagtgcaagttgtaggctgtctccacgccatggtctctctggcatctgacatccaaggaggtgtatcttactggttggatctagatgacatttctgagtcacagctatcaggggatggggaaaaagagagtttgggctttttggatttcacagtaagaagtaggatcctatcttccataaaaactcattttacatttcacagtgcattttctaaacacaataagtgggtacaaattctgagcagccaagtaaaagtgaatgtctaagggttgggtgaagagaaaatgaagtattttctattacaaacaggctcccaatgtatgttaatgtgttggaaatataactacattgtgaattaaagccttggattcaagtcctgttctaccacttactgaatgtgtgacccttaaccaattccttaagttcccagagattaaggtttttcatcttcaaaatgggaacaataacatcactcccacttatcttacatgctgttttgaggatcaaatgagtgtgtgaatactttgaggcactcttttagttctcattcatctttgtaacatggttgcctagcttaaggccagcctggagtaggtgttctataaatgttccataaaggtccagaattagcaataactacagaaagaatttgtaaaatgaaagccattaattaatttatgcaaataagtcatctatgtaggccagaaaagtatgatattgtcatccagggccagacttttttttttctttttttttttttgagacagtcttgctctgtcacccaggccagagtgcagtagcgcgatcttgactcgctgcaacctccacctccaaggttcaagcaattctcctgcctcagccccccaagtagctgggattacaggcatgtgccaccatgcccagctaatttttgtattttttagtagagacggggtttcaccatgttggccaggctggtcttgaactcctgacctaaggtgatctgcctgcctcatcctaccaaagtgctagaattacaagcgtgagccatcgtgcctggcccagggccattcttaagaaatatcaagtatgggaggaggccctgacactgatcatttttgccactgacctctttataaaataaatatggaaatagaagaacaacttatgcttcattatatagtacaaatttggttcacagagaaaactccttctgtgacaaattttagggactcattaatagttcttgggaattatggtaccatggggaagttatatagcttattgtctagatctctggccaatggattcaagttatcctgagaaacaagaaatatcaaactataggataactaataatacaagtgcacaatctcttaaccaaatcctttagagacagatgctttagaattgagaatttttcagatatttgaaagattttagcggtaaatattatttattacataacccccagcaaggtctggggcagcactttctcatcaaacacaacaatatttctgcacaggtatgtgtgaatactaattctaagtggaataaagactataaaaaggctgagtgcagtggctcatgcctgtaatcccagcactttgggaggccaaggtgggcggatcacttgaggtcaggagttcgagaccagcctggccaacatggttaaaccctgtatctactaaaaatacaaaaaaaaaaaaaaaaaaaaaaaatagccgggtgtggtagcatgcacctgtaatcccggccactccagtggctgaggcatgcaaatggttcaggagggaggcagagattgcagtgagccaaaattgcaccactgcactccagcctgggcgactgaggaggctatattaaaaaaaaaaagactataaatagcttcatatcagttcagttatggttacttcaacatatgaaattcaaaaaaacttctggtttttagagctttttggaattttagaaatgcagacaagaaataattcttgtactttccataaagaaattgtacttttcataaagaaatggtttttatagagatagaaaatgctccatcatgtacttttaacgtctttataagcttgaatattaatattagtctaacccttaaaattatctacataaaattacgttcacaatatcatttttaagttttatttttaattgaaaaataactgtacatatttacggagtacaacatgatgtttcaatacatgtttacattttgtaatgatcaaattagagtaattagcatatttggcaactcaaaaatttatcatttctttgtgatgagaatatgcaaaaacctcttttctattttgaaatgtataatacattgttattagttatagtcgctctactgtgcaatagaacaccaggttttattcctcgtatctaattgtaattttgggcttattgaccaatgtctcccttttcctcttccacccctttcccccaacctctggtcacaataaggtcatatgtgacagacccactactaatattacgctgaatgtagaaaagctgaaagattttcctctaagatcaggaacaaaacaaggatactcactttctcctcttctattccacatagcactggaagcctggaagtcttagccagagtagttaggcaaaagaaagaaattaaaagtatccaagttggaaaggaagaattaaattgttcctgtttgcagaaaacatgatcctatatattaaaaaaaaaaaaaaaaccctaaagactgtactaaaaaactgttagaactaataagcaaatccactgaagtttcaggatacaaaatcaacatacaaagttcagtagcattttcatacactaatagcaaaagatctgaaaaagaaatttaaaaatcctatttacaacagctacaaaaaaataaaatacttagaaataaatgtaatcaaggaggtaaaagatctttacactgaaaactataaaacattgatgaaagaaattgaagaagatattaaataaatggaaagatattccgtgcttatggcctggaagagctaacatcgttaaaatggccatgctgaaaaccaaacatcgcatgttctcactcataagtgggagttgaacaacgagaacacatggacacggggagaagaatatcacacaccggggcctgtcggcagggtggcacgctaggggagggatagcattaggagaaatacctaatgtagatgacaggttgatgggtgtagcaaaccaccatggtacatgtatacctatgtaacaaacctgcacgttctgcacgtgtaccccagaacttaaagtatcacaataaaaaataaaaataaaattttattttaagtttgaataaggcagtaaatcaaataaatcacctttaagatataatttaaaaatatacctccaggaaaaaaaaatggccatgctacctgatatggtttggatttgtgtcccagcccaaatctcatgtcaaattggaagaggggtctggtgggaggtgattggatcatgggggtggatttcccccttgctgttctcatgataatgagttctcatgagatctgatggtttaaatgtgtgtggcactcctcccttctctctttctctctcttactccaccatggtaagatgtgcttgtctccccttcaccttcaccacagccatgcttcctgtgcagcctgtggaactgtgagtcaattaaacctcttttctaaataaattaataaattatacagtctcaggtagtttttgtttgtttgttttttgttttttgggtttttttttttctgagacaaagtctcactctggtgcccaggctggagtgcagtggtgcgatctcggctcactgcaacctctgcctcccaggttcaagtgattctcctgcctcagtctcctgagtagctgggattacaggcatgcaccaccacgcccagctaatttttgtattttcagtagagatggggtttctccatgttggtcaggctggtcttgaactcccgacctcaggtgatccacccacctcgacctcccaaagtgctgggattacaggcataagccaccacgcccagcccaggtagttctttatagaagtgtgagaatggactaatacactacccaaaatgatctacacatggaatgcaatccctagaaaaataccaatgacattcttcacagaagtagaaaaaacaatcctaaaatttgtgcagaaccacaaaagatcccagataggcaaatccatcttaagcaaaaagaagaaaactgaaggtatcatactaactgacttcaaaatatactacaaagctatagtaaccaaaacagtatagtactggcataaaaacagacacacagaccagtggaatataattgagagcccagaaataaatccatgtatctacagccaactgattttcaacaaaggtaacaagagcacataaaactgatatccacatgcagattaatgaaattagactcttatcttttactacatacaaaaatcaactcagagtgtattaaagatttaaatttaagacctgaaactatgaagcttctagaagagaacacaggggaaaatctccatgacataggtctgggcaagggctttttggataagacctcaaagcacaatcaacaaaagtaaaaacagacaagtgggattacgtgatactaaaaagcttctgcacagcaaaggaaacatcaatagagtgaagagacaactaacagaatggaagaaagtatttgtaaatcagacatctgataaagagctaatatccaaaacatataaggaactcaaactacacaataacaagaaaataaataatcctatttaaaaatgggcaaaaaacttgaatagacatttctccaaagaacacatacaaatggccaacagatacatgaaaaaatgcttgaagcaagcaaaaactctctaaacatcagaaaaatgcaaattaaaaccacaatgatacatcacttcacacctgttagcttggctatcagcaaaaacatggaagagaacaagtgttgctgagcatgtggggggaaagggaacccttctacactcttggtagtattgtaaagtagtaaagtagtagagccattttgaaaaaaatagtacggagtttcctcaaaaaaactaaatatagaattaccatgtgatccagcaatctcactactggttatatacccaaaggaattgaaatcagtatgctgtagagatgtctgtactcccatgctcactgcagcattattcacaatagctaagatttggaaacaaccttagtgttcatcaatgggtgaatggattttaaaatgtagtatatatatgaaatgcaatactattctcctatttcaaaaaaatagaaaatcctgtcatttgaggcaacacagatgaacctagaggataatatgttaaatgaaataggccaggcacagagggacaaatactatataatctcattcatctgtggaaactaaaaaagttgaactcataagagtagagagcacaatattattctttttaatgtccaattcagcaaatcctgggattcaaccaaagagatcatctatttcaacctgctgcctaattcagctgattcctactaatagcatcctagccaggtagtcactaagcctttgctaaacagtcatatgagtgaagaattcactccttcatggggcaagctgctgtcctctagacaactttaatcactggaatcaaaatcagcccctctgtcacttttaccctttggtcctaactctgacttagaacaggaaaaactaacctctctgccgcgtgacagctatgcaaatatttgaagtggcagccatgcaccacattattggcctcttctctaggctaaacatttgctctaactcttccacataaagcatgatttcctcttccctcacatcctaatgacccatgtaagctctaatttattgatatctatattaaaattaggtacctagagttagattcatctccagcccagaagacagggaatttgctacctttcttgtaagttgtatgccatatttcttgtaatgcagcctaaaaatgcattatctttttttcatgccgcataatactgttgagccatttgcatttatagtaaataaatgcttccttctttctcacatgcattcttgtcacaatccaggaacctcccttgatttctatttttcagcctaaataaaggactttatattggtccttgtaaaattacatgatgtttattgtaattctaacatgcatattccattttgaatcttgattttgtctttcaatatgttagctcgagaatattatattaagtgaaataagcacagaaagacaaatgccgcatgctcacttacatgtgaaatctaaaaaagtcaaactcatagaagcagaaactagaatgatggttaccaggggctggggagtgggagtgggggaagggagacactggtcaaaggatacaaaattttagttagacaggagaaataagctatagtgatccactatacaacatggtgactccagttaataacgtacatattgtatacttgaaaatcactaagagagtagattttttaatgttcttgacacaaaaaaaaaaatatgttaggtggtacatatgataattagctcaatttagccattctgcaatataaacaaatttcaaaacatcatgttgtaaaccataaacatataaaatttttgtcagtcaaaaatataaatgagaaaaaattcttttccttcctgaaatgtgtgtgtatatatatacacacatacatatattgtgtatatattacatatataacatatatatatatacaagatatataacatatatatacaagatatataacatatatatacacacacaaaatcaatttcctactatgggtctcacccagaaagtttacaaacacagtattaaagtatgagtgagatttgaagtagcacagaggagaggagaagacaaggaaaaatcttatcccattaaggatgaataaattcctataaaacataactccttcactgaccaccgtactcaccccaccccagctacccaccactgtaagccatcccaacatgcagaaatcaatattttaagtatatatatttttaagtgattgtttggtattccaaggtattactcacttttaaaattggtcatatgagggctcagttacaaggcaagtgactctggtttaatatgtgttcatttgatggacacccagttttttaaaaaacaccaggaatacaaatacaaaatatccaggatttctgctgtttgcttatattgtgtaacaaaactaatgttaaacatgacccttgaaactgtcctggcatccttcagtcagatactatgatgagtatgatgagcccatagtaaatttcactatagttccacttggaagaaaatactttttcctaagttcttagatgggaataacttaaaatctcttcagaagaaatacccactcaaaaatctatagtaaattttaagaagtcacgtaactctgaagcgattctggctcagtgatcacttcaaattgtgactgtttttttcctctctctctgttctgtttcttttgcctttcttggtctgaaaatacagagaggtaccaaaaactcagtacataatttgaaactaaaagcaacaaacccattcattgaagtataataggtcatttggaaataaaattcattttttaaaaagagaatccttttttggaatccatttttggaatatgaagtcaatcattatagctttattccatcagaaatagctttttaaggctataactcccaaactatttggattaagaattaaaatatctaaagagcccataggaaattaacccaatcatcataaaggtcccattttaataaaaggggatccatatcaaatcagactttacatgtggaagggaccttgaagagcatctacagaaggaaatgcaggctgtcggtcacacagctagacaataataggattgggaccagaatgcaggccctgcctcttgatccaggacttgttttcactgcacccttgaccttaagagggtgatggagtagacctaattcctcctaaaccagtcatttataacttcctctgaccaacatccaatcacgtcaaaagagaacaagaaaaaacaaacaaacaaacaaacaaaaaacaggtggaaacttagtccattactttgagatgggatctgactgttttttctctttatacagaaaatggagttatcatcatcacctcactaaaatgtaaggtccatgagaacagggaccacatctaacttattcatggttctcttgcgagcacttatgtggtgacatatttttgggtgctttttatttatttgtttttgtttttactgaccactattcaaacactctattttgaggtgactccctaaagtgtgcagtacaggtgaaatgcagtgctcctttctcagtccctggcggccaggactctagtatatgctctaggagaggtcacaccctaattggctcttgtagaagtgacacgaaaacataggacagtgtggacgttactcttggctgcggcagcagcagcagagacaagtgggtcagcagaggcttcctaaaccagtctattgcagggcatgatcttggctttgttcctattcctagtctcccttggaactaggaattggttcctgcttcactctcctgccttcctatcacttcttcctcatttattcttcctgaattatttggtttcttcctcagacgttctttcctacttttttgtctaaggcagcttctgttgcttgcaaccaaaaattctaataggcacatagtaggcactcaaataagtcttaaatgaaaataaaattaatgaattattatcataatttttgtagaacacttcacaatttccaagcactctctcgtatcctaattactgcacctggtcactgtctcatttgtcttccagttaagttataatatttaacaagggcaaatccttcttgatgcaagagtcaagttaaagaaaattttaaaaatctaaaccaggcttagacgtgattttttccaaagtatgctacgcaatctcatggtattaggtaccactatgaatggtatcatttaagtaaaaaggaagccctaaaaaatgaaatttagaataccaactggggagtaaaagctggaaagtatagggcatgaaataaagtttaaaactttttgaaggaggctgggtgtggtggctcatgcctgtaatcccagcactttgggaggctgaggtgggtggatcacctgaggtcaggagttggagaccagtctggccaacatggtgaaaccccatctctactaaaaatacaaaaattagccaggcatggtggcacgtgcctgtaatcccagctactcaggaggctaacgaacgggaggtggaggttgcagtgagcccagattgtaccactgcactccagtctgggcaacagagcgagacactgtctcaaaaaaaaaaaaaaaaaacttttttaaggaaatttgatatgcaaatagttgcacagaagagatgtagaagtgataactgaaacttcaaatatgagctggcattcgccagatgaaatagcatcaaagagctctagaaaagagcactgaaacttcagataggaagttcacccaccactctaccaggtgcagtggggtagaaacggttcagtgtagaggtctagaaatgagcactgaaacttcagataggagctggcattcaccaggtacagtggaggtagaagtggttcagacgctgaaggagcaacatctacaaaggcaaaaactatgtcccttcaaaacacaaagaatatttgctttaatcatatggctctaaccaagggggggagggttgtgaattcttaaaaatatcttcacccaccccatctcactttactagaaattgaagtcaaccataacccacaccgttctccaagaattaaatgggaaattttataattacaaatggtatttcaaaacttgatgtttcagaattcccttaataattccactaccttgttatcaaattatgttgataaggtaaagaatttgacacagggcatcctatttggtctctgtcaacacgaagcccccaaaccaggtttcctcagtctgatagttggaaaacagttacaaaatccattagtccatctcagtaagggagagaggaacagccattttgtgtgcagtgacctatcctcagccccatggactatgtagcaggagatgtagtggcgaggttccttttttactctctatatctgatctccaaggagtcagtgctcaactctttccaggataaagtctgaagaacacatttcaccaataaaaaaagatagtaaatacttgagtcgtttcagagagagaaaaatatgaaacactgaagatgaagcgcttaaatctttaatgtttttggacaacacagtctatatgttttctgcataatgtatcatttctttaaactatagtattaaaaataatttcaaattgtaatgaaaagtcatttggctttaaaaccacccaggaagaggatataaaatgcgtataccaaaagactatgatgcggcttccagtgtttttctgatatagatcataataatttaaaaaggcttttgtcaggctgtctgaatacatcaaatactttctcatttctgtgtcggctgtgaagctctaactatagtggcttctctagcaggtattctccgcacaactgtgccaaatcgttctgaggacacccagattctcctccttctcaaaacagacattcctgactgggtcctagggcagggagaggggcgttggacccctactgccctctgggttctccgagcaccaggacttgttgctccggcgggaactcgcgcggatccaccggctcggcacatcctgcctacaagtagggcggcgtgtgctaggagccgggccccgggccgagtcgtccgtgccgcagcggagagctccgaccggcgcggccccaccatccgctgaccttcgcccggtccggcctggagcccggccgcggcctccctaggcctctctaggccgggcgccggttcagcgaggaccggaagcgcccgccgtccgcccttccgcctccaggccgcgggcgccaggccgggggcgggctggggacgccctgggagtgccccgggggccgccttcttccccgcaagcccggagcgggcgtcgctcccgcccccgcctcgtcttcagttcccccgtcgcttccgccgccgtgggtagaacagacccgagctgggagccaggcctgcggcccctcgaacactagccacatctggcccgccgggcctagcacggagagaggccctggggcttggcggccggggccgggagaggtcgcgcggccaaggacacccgagggcctgggctgcctccccgcccttccccgcccctcccctcggccctggaatcaatagtggccgctgacttttcacgacaattgcagctgtctaattcatcagcgaataattaaatcagaggccgccgggcctgcctggagtcggagacgaggggtcgctcctctcaaatcctgtcaaattggggagccagtgggcagcgcggagagcggacaggcctcgccctgcgccgaggctgcgagagccgcctggacccggcgccattccgagtgtagggggaagcaagcccccaggtgtggggagcaaaaggaaggaggagggcacaggcgggggccccgccgaggctggactccctcgtcagcagggccctcctggccggtgcgtggtccgggtgcccggcgtggggcagcggccgtggggcccacagacaccatcctcacgcagacttcgcgaatgtcgtggaactccatcctcgggaggcgctttgcctttgaggaagatggagaggagtcgggagaagcgcctagaaaccgcattgatttagacatcaatcctggccggctccctccgcctgccgagctgcggggccgcgccgccccgtccccgagaagcggacctagggtacgccgggctccgccgagcgggcaaagggagcggcctgcgccgccaccccgcgcccgcggcctcgacgccgcagccgccacgccaacaccgattcctcgtggccaacaggtttctcgcagccctccgagtcggcagcgccgcccgcgtccctcttccagccgggccggcgggacgccctcagagcttgtgctctctcgaggccgccgagcccactgagcccggccggggcgctggttcgcgtgggccgcggggaacaggtcccgcttctccaacgaccacggccccggcggctgcgaaacggccacctccgacccttgagtccgccagagtcgctctccctttcacatttgcaagcaaaacaacatacgtaatagtgacatcgaggcacttttccaaactaaaatgatcctaaaataatctgaatgtactgttacttttgatcgtgttaccccaaaagattagctcagattcacttggttcttttatttctttgggagatgatactcgaggaatctgaaaaaatatacgatttttaaaaacgatatgattcgcatacctatttcaacccctcggttggttttgttagtttccaaatagaaatattgccttttgaaatcggagatcatatttctcaagtttaaaatctagccaagtctttttttttttaatactccgtctgaaatttttttccatggtagctagacaattgaaattatacacaaagattttttaactctcggattttcattggaaggggacgtaaatagtttttgtactaatgcctaaacaatattggatcttcaatcaaaaagtattttcagggcaaataaatgatagttttaagagggtaataaataaaagcaacacccgtgcttagtgtctcagggcaacttgaaaacagctccactttcagggagttaaatttgtcctttttacaatcaactgcaacttttgccttcctttggaaaggacgacaaaaagatttcacgcacaacttgaccggaacaaagggacatcatgccagtttttcttttgtggggtgacaactagaagagaggaaaagtttattttaaccatacttgagttgtacttttggaaccctcctttaaagagaaaatgtgacggcagatctttcaacttaaaaatcgaagctatggggctttggggcagaagggacagatagcgcgagcaaaactgaaagtcggtgaggggaaattttgtcttcgttctcagactaagttgcctatttaaaatgaaactttcttctagagcaaaatctccgttcccctaagagctgtgcttcccccaccccttccgcaaaaagaagcccttgggtatttgcaggttcgaatcctcaaccttccctcctttgaatttcattttcccaaaagagtagaattatttctcccaccagcttctgcagcgttagcatccgaaaaatcgggtgggtggggcgttgcagaaagggtctgcagttggccccgaattcggaggaaggaaagtccctggaagggaccgcagtcccagcccccagtcctggggaccggtccggatcagaggcccggccacccacttccacccaaactcctcacgggagggggctgtggaaaccctgagagggcagggagctggagaagcaaagaaatgtacgtgtgtgtgtgtgtgtgtgtgtgtgtgtcagggaagtaagcggttcccgaagacacaaaacttcaacagtcccctatctatatgggtagaggagggcgatcaaggtcggccgccctggtgttcttttaaactagacaggtggacgcgctagcagcttagctaggcagagctgggattccggtttcccctgcagactgacactccctggagcaggtgccaaagccctttggggtggggtctcctcccctttcccctctctcaagcctgcccactctcggcgtctggacttcggaggaaactatagtttgcttcccgcagccctactcccccaccttctaatccaggtgctgggcttggggctcggagagaaccttcccccagcacgcagggctcctgtcgcttctttttcctttccctaagaggccggacaagggtgagaacaagactaacaaccccatatctctccctgccctcacgcaaagtatcttttgtcaaccaaaaagttaagggcagtcccctgccagctctgctaacctggcgttttgaattttaacaagattaacgaagaagaaggagacaaaaaaggacgcgtttggcctcaccacccagaaaaacaaacaaacaaaaactttccaagatccaactggcaaatctgaaaagtgacggtgaattgtgacagtgaatttctgagctgagaggccaaagagaattagtggggcccggcttcggttttagttttattctccctgggctcagccagcccgagctttcaaacagaagaaacctgaagctaatgaagatctcaaacagagccacaattccgagggccccttttccgccacaagcacccactgtccatctgcacgtgtaatcacagagacttgccctgtcttcattaccaggggatccgaggaaaggggagaaaattctctgtcgtgaaaaggaaccttgtgttatcactactattatttgtgtatagcgacctaagagtttccttgtcctcttcaaattcccctacaatattgaaacagcatttgttgccccattcttacaaacgtttgaggcctttctggaaaaccattaccattcaaaggctagaaaattgctctccttccttttttttttttttttttttaaaaaaaaggcaggcgcagcagcagctataacagataacaaaaactttctaccgcataatcctcgccctcagaatgacaaagaaatgatattgacttacccccgaacggatgatgtgtttgataagggagggaaatttttttttttttttgaagatttctgttgaggagctgcacagacagctgcaattcatgggcgacgctgattgccagaaacgctatggattggcatggggtctgcagctcacagatccctgatcaatacccctacactaacacgccagatggtttggggaaggacaaaaataaaatagtccaaatcaacccaccattatgtttttttgtgtgtgtattgctctgataacctagttgtagcataaatgtgttctaccctgacacaaaacctgacaagatttcgagcattggggtagaaattagcagctctcctctaccctagatttgggtcgtggttactgttgtatagtaaaaacaaagatattgggccccttatgcagattgggtttacttgtggtctgtttatctttttccgtgaataatttataaagtatctcttttaattgaatgttcacctctctgtgtgtgtctctctatacctaaaaacaattttattgtggaaaacacatacgaaaaactccgatagtaaatagttattttcctgcaattgctaactcaagttcagaatgtttttcttttacagtgcaatagcctataatagtcttgttgtcgaagctgcattttattttcatgcttcttttgacccatttaagtttctgatcttcaagaaaattggacctgtgaatgtggcatgctaagtgaatatccaggtcctgatataatgcttggtacaactgtttgtccagattctaatagccgtgaattagcacttatcataccacatttctatacagtgtgtttgtaaatcaaatgctggtggggaggggggagaagaggagtgtaacttcaaattaaaagaaaaaattccaagttgcagaacttcttaaggttaaagtatggatgctaaacaaggggcagttagaaagccactttcccttatattttcttaaagaactatagagaaagaaacatcaaaaatatttcaaaaaatacttgaaaatcgtattagtattgatactccaaaaattgtcttgaagtaaaaaacaaatattgttcctttttagaaagaaagagaaaagggcatccaaacctaattcagtaaaaattagggtgctcactaaacaagcacatccattttccttttaaatggattttgggttgaaacataaaacctcaaaccaccattataaaaacaacgtgaaaaatctgctttaattctagtccaatgaaattatacacaaagaagccaatacgatttcatgatttccctgagatcgccaatattgatcgagggaaggcggagggatggtgggagtgagggaggagggagggaggaaggaaggaagcgaggcagcgagaaaatgcaactcacctttctgctcccaggcacaccgaaatataattcccaaaagcaggtttatctcagtgtcctggcaaatgagtttaacattttgaaaatttatttaaatggcaatttatatacctaggtttctgtatggaggaagcatcagcctagggtaactggccactccttgagactgaagccagcagagcagcagaggctaccttagcactggggcatatcagacccactacttcccagttctgcttctctcctgctgtatttcagtccctgtgcactcatggaccaagaacaggttgcactctcgtgaacttttgctcaactcagtattatatttcaaacattaactgactcaaatcatcccaagtgtccagatgccatatataaggtagggagtgcgaagagagacagtaggagggggtgaggaggagaggaaaaacagagaaaccaaaatctgagttattttacctggctcctgttgtgacactagagatgtgagcaaccagaaaagtatgtctggcaaaccagaggatctgccgctttcttactcaggctttgataacacagagaagacgctatttgaaagaataattggcagcgtattggccagagctcaatgaagttgatctatgaataacgtcactgtacattcatgtgacagggtgggggtgggggtgttgctctgaagcaagaagagagaggagggcggcagaaaaggtcactgagactaagaactgttttccaaatgaatcaaacctttctctggcaccaagaagggacatacagtattccgagctctgcccttgttttcttatcaagttttctctaacagctggaagtggttgaagggggctgtcttaaggagaccccctgctcttcttttgacagctgatcaaaagaaaataggtcacgcttctcaaacttatgtccaccctgtccttaattactgtctctttaaacaaaggcaacatctgcgcaacctcagctagcttgaatcttcggaggcaaacagagcgcaacctgctttggaagaatcttgttacgtttaaggctttatgccgggtgttggcctctctgtcttcaactacccctccaccccgactcggactgcagaaatctccaactctctgtcccccagttccactcccacctccagacctggggttgccaaacaacggaaattctaggaagacgtaggtgcggtttttaaagccttggcttgtgagcgttctcaggctggccggggcgctggtcttttcagaaacaaggtttgaatatgcaggtgtcagccaggattccttgtcgtctgcccaccgccgtttctctcccgggatttgagagaagcgggagtgtgtgtgtgtgtgtgtgtgtgtgtgtgtgcgcgtgtgtgtgtctcgtgttaggagaaaggtccgtggttgccgtctcagctggtttgcttactctctgcccccaggagaagtttgctcacttgggacaccagcgaccctcctcacctccacctcaccggttctacactctccccacttctttccaagtcgctgatgcagaaagcacttggtcaccttgaaacggcagctcccggaattctagttttgttttgcaatctagcagggctcttcggaagcctcataactgagatttatgggctcaccgggtaattaaatgatgttattgtgttaactttgcatgcattactgctgcccgcgccgcccgtgggccgccggccggccgcagctcgctggcgacgagggcactacagttgctctgaccgcgtagattatgcatgtcccggcctcgggaatttaccatgcattagaatacattagcgcctgcattttaaaaggctaaactattggctcccagctagggactctcggtaagtggcttgttagtgacgagtgtttgtctatactggcacatagcggagtcttttgctcccggcttactcgcctccaggaaagctttggggtgaggcgaaggcgattgaagcaatgccccttcccccagatcgcagctgctcaggggggacacagcacggcatctttcaccgaatctctctcgctcgctcgcactccagcctccctctccccagcgacccccccaccttctcctccctccctctccttgacgtttgattccagtagcaaaggaggtaaaaaaggcaccgagccgtcagccaaacctgaaaagtgcggccccgccccctccacagccactggtagcttcccgtggaaggcccgcctcccggggcagctgcggcctcggagtggttgcgcttggcgcccgtcgggcgtggccccgccccaggtccgggagggtaggttggctgccccggcgagcggcagagcccttctggacagctcccgctcacccaaacagaagacgtcggcgccggagcgggctcggacatggcgaggctgcgagccggcccgagcggcggggcccggtgatccctccctccctccccgtcccctcccctctcccgcacgcacgccccgtccgcccccaccccgcccccaccccgggcgagcccgcccgcagcccggggcgcacacccgcacgcgcactcctctccactcactcccgcgcccgcccccactcccgcagccgagccccgccacgcgcgccttgcccgcccgccggccgcccccgccgcccccgccgcccccgggccctgatggactgaatgaaggctgcctacaccgcctatcgatgcctcaccaaagacctagaaggctgcgccatgaacccggagctgacaatggaaagtctgggcactttgcacgggccggccggcggcggcagtggcgggggcggcggcgggggcggcgggggcggcggcgggggcccgggccatgagcaggagctgctggccagccccagcccccaccacgcgggccgcggcgccgctggctcgctgcggggccctccgccgcctccaaccgcgcaccaggagctgggcacggcggcagcggcggcagcggcggcgtcgcgctcggccatggtcaccagcatggcctcgatcctggacggcggcgactaccggcccgagctctccatcccgctgcaccacgccatgagcatgtcctgcgactcgtctccgcctggcatgggcatgagcaacacctacaccacgctgacaccgctccagccgctgccacccatctccaccgtgtctgacaagttccaccaccctcacccgcaccaccatccgcaccaccaccaccaccaccaccaccagcgcctgtccggcaacgtcagcggcagcttcaccctcatgcgcgacgagcgcgggctcccggccatgaacaacctctacagtccctacaaggagatgcccggcatgagccagagcctgtccccgctggccgccacgccgctgggcaacgggctaggcggcctccacaacgcgcagcagagtctgcccaactacggtccgccgggccacgacaaaatgctcagccccaacttcgacgcgcaccacactgccatgctgacccgcggtgagcaacacctgtcccgcggcctgggcaccccacctgcggccatgatgtcgcacctgaacggcctgcaccacccgggccacactcagtctcacgggccggtgctggcacccagtcgcgagcggccaccctcgtcctcatcgggctcgcaggtggccacgtcgggccagctggaagaaatcaacaccaaagaggtggcccagcgcatcacagcggagctgaagcgctacagtatcccccaggcgatctttgcgcagagggtgctgtgccggtctcaggggactctctccgacctgctccggaatccaaaaccgtggagtaaactcaaatctggcagggagaccttccgcaggatgtggaagtggcttcaggagcccgagttccagcgcatgtccgccttacgcctggcaggtaaggccggggctagccaggggccaggctgctgggaagagggctccgggtccggtgcttgtggcccaagtctgcgcgccgagtcacttctcttgattctttccttctctttcctatacacgtcctctttcttctcgtttttatttcttcttccattttctctttctcttccgctcttcccctactttcccttctcccttttctttttctttcttactctctccttgtccctgagctttcattgaccgacccccccccatttcattcgccctcccctcaatgtgccaacctttgccctatttccgatcttcccaggtactgggaggcgggatgggggtgtgcgttttcctctaggagccctgtctttccaagacccacagaaaccaggacctgcccttattcaaaaccccatgcacttcaagtctcttttagacaacacatttcaattttccgggctgactagtctccctgtgcagaggcagttgagaggctttgctctgcagagggaaaagagctctctactctcccacccaccatataggcaaacttatttggtcattggctgaaggcacagccttgcccccgcggggaaccggcggccaggatacaacagcgctcctggagcccatctctggccttggcgttggcgcagggactttctgaccgggcttgaggggctcgggccagctccaatgtcactacctacagcgagggcagggtgtaaggttgagaaggtcacattcaccgctttgggaggacgtgggagaagagactgaggtggaaagcgctttgccttgctcaccggccgtccttgccccggtcccagcgtttgctgggatttgccaggatttgccggggctccgggagaccctgagcactcgcaggaagaggtgctgagaaattaaaaattcaggttagttaatgcatccctgccgccggctgcaggctccgcctttgcattaagcgggcgctgattgtgcgcgcctggcgaccgcggggaggactggcggcccgcgggaggggacgggtagaggcgcgggttacattgttctggagccggctcggctctttgtgcctcctctagcggccaagctgcgaggtacagccctctattgttctaggagcacagaaacctcctgtgtgggcggcgggtgcgcgagctagagggaaagatgcagtagttactgcgactggcacgcagttgcgcgcttttgtgcgcacggaccccgcgcggtgtgcgtggcgactgcgctgcccctaggagcaagccacgggcccagaggggcaaaatgtccaggtcccccgctgggaaggacacactataccctatggcaagccagggtgggcgacttcccatggatcgggtggaggggggtatctttcaggatcggcgggcggtctaggggaacaattcgtggtggcgatgatttgcatagcgcgggtcttgggatgcgcgcggttccgagccagcctcgcacagctcgcttccggagctgcgagctcaggtttccacccccgatcccccgggctttcctcgcaccgctgagcccagcttgtggggtgcactcgaccaacgcccgacagggctggggaatgtgacaggcagcaggttcacccgggcttggggagggggagtttccgctttgacagcattttcctttgccgtctgctggtggattcctattcccagtcggtaatcgccccgcagtgttgatctaagaaggtaaagaaaactaggtttccctgcaaagagcctcccccaaatcggcggactccggatactttgagtggatttagaaatttatgtaatctttctcctttagtttatttttcatcctctcctacagttttctctgatttgctgttggttcggggcaagataaagcagccagtagagagcgataataatagcggcgggaaatgaactggagactggctgacagttcttaacattttgtcatagatccccccgaatgtcccaggctgtctctggtgggttttagtacccgccggcttcttgggcaccggggaccagaaggaacttggcagctggtcttaggggtacagttaaaggcaggatgacagctattctcctgctcatctcagagcgctgccgccccctcatgccggtcgcgcaaagaacacagcttttaaaaaacacgtgccttctgcccatataggtctgaaagtgatgaggaaagtaatgcttcgcctattagcgagtttcagcttttaaaatgatcccaagcgttgctgagatgagaaagcgtggcatcccgggggtcctcagccccacccgcgcccatggtgcaagtctgcagggacaggcccgggacagcactgcccacgctgctagattttccgcagaggatcgctgaagctgccttcgtgggagacagaatgcctcctccagcgagtggaaaaggcctgctgaggaccccgctttgctcgagcattcaaatgtgtgtctgttttattaccctgggttgaaaagggacaagagctttagcctttttatctggccattttatcagcaactacaagtgtgttgagtggttattattacataggaggcttttcagtttggggtcagtagatcagtctcttcagacactgatgcagaagctgggactggtaagtaggtattatgtgctcggagcgctaggggacaggagcaaatggagaagaaaagcggaggctttctccgcccggagtatcgatcggaatccccgccggtacgccgcagagggccctcgccgttgggccccgggggtttaacaagcccagccgctccgcaggcggctcggccggactctcagaccggtgcctggaagacaccgtccctgcccccctcccgccaaacctgcctcttctctttctctcataggttataggttccctttctctctcattttggccccgcccccgggtcctgccaaacagccaagcaggccggggtttagggggctcagaatgaagaggtctgatttggccagcgccggcaaagctcacccttaggcgaggtcacaacagaggcaggtccttcctgcccagcctgccggtgtagtcacagccaagggtggcacttgaaaggaaaagggagaaaacttcggagaaatttagattgccccaacgttagatttcagagaaattgactccaaatgcacggattcgttcggaaagggcggctaagtggcaggtggttgcaaccccgcccggtcgggccttcgcagaggttccccaagaccagcccttgcagggcggttttcagcaacctgacaagaggcggccaagacaaatttctgcgggttcgagcacacactctcgggcgttgggccccagagacctctaaaccaagcacaaacaagaagggagtgagagaacccaggctagaacttgcacgggcatcccactgaggaaaagcgaggcctcggtggcaggcatgttttcttccgacgcccgaaaatcgagccgagcgcccgactacatttactgcagaggtttccgcctccagtgagcccggatcccccagcggcctgcccggagctggtctccagtccccgccgtagtccgacgcacggccctctcctggcagcaagctcccagcggccagtctgaagccaattctgttcaggcggccgagggcccttagccaacccaccatgatgtcgcctgggccacctgatgcccgcagcggcgggacacggcccgggcagtgcgcagtggctcctgctaggggcaccgcgtgcgtgcttgtctcccgctgcgccggggacgtccttgggtgacacgggccgctgggcacctcccaagccgaggaaacggacccccttcgcagagtctcgcgcccaccccccaacctcccacctcgtttctcgctgctagggctcccgactcagcccacctctcctggcggtttagttagggatcagagctggagaggctgaacgcaacccgtgccagtacggaacagacgatatgtttgcctgctagctgcttggatgaataattgaaaagttcgctgcagtctgtgcttcgtcaagtcccgggtgccgggagaacaccttcccaacacgcatcagggtgggcgggagcgggcagaggaggcgggacccgagggaggagagtgaacccgagcaggagaagcagcccaggcagccaggcgccctcgatgcgagaggctgggcatttatttttattccaggctttccactgtgtggttatgtcactttctcaaacaaatgtgtatatggagggagatcgatgctgataatgtttagaagattaaaagagcattaatgctggcaacaataacgtaaacgtgtggacccagatttcattgatctggaacttgatccggcgcgtttccagtaagcccgacggcgcgctcttcccagcagagcgctcaccagcgccacggccccgcggttttccagcggtgccgcttcgccagctctgcgcgggttctcccgtctgaccgcagctcctcccccgcgaggccccagcccgccttacttccccgaggttttctcctcctctcgcggggctctctgccctctgcaccccctcccccgacctctgcaccacccgcccctgtgcgcacacaccgctacttgcgcttccggcgatccgcctgggcggctgggtccgcgaagccaatgcgctgaacggtgcccgagtcttcctaactatcctgtgcttggccgttgccactgggccctggtgactaagcccaagtttgaaaatgacgtggctaaagctgcctgctaacggcagagcttaatcagccgcagatcccctcctatcctcatcggttctcgtactaaaaaggctcacgcgcagactttttacgcaggtgcattcgttggacaattaaacgtggccctagtaacaaaagcctgagcttcatccctccgagtagcaggctctgcgctggactggtcgggtctaacagggagaatcttgtgtcctaccttggctgggacaggaagtaagagaagcaaactggggaacccctgccccaccccttcccaccccctggacgtcctgggccgaggcccgggtcactggcccatcgcgggtaaggaggtgtcctgtggaacacctgcattgactggaaaagaaagaactttaaagctcttccttcccgcttgtgggggacaccaccacaccctgccaaccactcccctggccaaatggtggcttgtttttccagaaggagcactaaggtgaattttatggaaaaaaaataaaagatcagggacctaagtgggagtaggatgagaactaattcttctgggttttttttttttttttttgaaattatgaatcccacctgttgaagaaggctgagcttttccaacagcgggtatcaatcgggagggaaagcagtgttttccagccctctccaagaacagtaattaataagaggaaggaaaagagagatgggaaagcaaatcgtgcattgttctgctttgagttgaggcagagggtaggctggtgtttcttcctcatcttcccactagtgttcttccttaaagaagggagctttggtacaccaccttggttcctagtcagaaagtgccctaccggacccttttaaactacaatgagatagctgggtaatcagatatgtaactaaggaggagagcaggtggtttccctttggtctggcggacaactggctccctccccacagcccccacttgaaagactcctaggccctgggaggggcgagtgggcctttagaggatagaatcatagactctctcctactcccatcttagaattccaagattgggcaggattcctggtgaatggtgaggtctgggcaaaggataaactgattaccccagattctctgtccctacaaggcaccagcagctgcttcactctccttttgagccaggtctgccctgaggtaacagtaccctaggccagttttaccatcccaagtgccagacttcagccctgagggaaggagagccagcctctcctgctgtcttcaaaccaaggcttcattttacagtcacccccgatatgagagagagcctccccaccaggttttctggcctttagacacttctcttcaaagaagagaccagaggaacaggactgaaaaactctcaggaagaaagtcctgggctccacactccatggctagtggctggatttggcagaaactgtcttcatgaaaagtggtatcatggagggggatccctggagcaaggaagacctcaagggagaagcagagagatttagtttctgggttcttgccaaaggaagggaaattaggagggaataaatagaaataattgcctgtataaagggccctggggaggagggtgaagacagaggcaccctaggccttaaacttcatctagactccctgggctgtgctgacttctgacccttttagggacctttgtttttgctgacttgggaaaagttgcttcctccagggagacaactcttcttagaggggagagtccataatgaggaagccctctggggtgatttatttatgctgtcaggtatagagctccgtcaggctaactcaccctgtggggccctatcaccccctcttatcacccaggctttttccctaaccaacctctgtgcctttgggggaaaggctttttgatttcccagtctcattcaaggcaatggctgaaaaatgtgcataggtttttctaggggcaggtggggaaaaggtagggacgtggattgtgtgacccagcccatctaatgcctgacatggtgcagatgggcaagacttggaggcaggctgtgggctgtgcagatagagatagcctcacttcgggagcaggattcctagaagctgtggacgtttattatgaaaaactgtcccacacaaattgtcccaaagggcagggaggctctgcattccacctcggcacctctttcaccatttgaggacccattactcttctgtagaaagcagactttgtttgggttggaagcacacctccaatgtaatttaatcagcattggactttggctcttgtaatcaaatatacatatactttctcctgcaagaagaaaaataatttctctgtaactggtattgacttgaagtcatgtaatctctggaaagcatcacatttttaaagggaaaggtaaaattaaggggaaaagaacccgcagtgttagtggtttgctttgtcatactaagaagagccagttaccacttaagaaagggcagaagaagcattcctagagcataaatacttgtgctgctccaattgtagatatttcatttacagttttctctgtgcaatcagccttggagatggttaaggataggaaactaggttgactggctcaccaaattctagaatgtgggctttattacttatgttgcattgacatccttgaaggaacctgtttgacggctcatttttctgccgtatttggagaggccacaggcagcagcagctccttgagttccagcaggatctgggtgggtagcaagcctttccttttaagggtgattggcagccattggcagcttgcttcccactccaccccagtgcccttgagcatgaagctgtgccctactgcgtcctcctggagcaagcttggagtccccaccccccagggtgaggttctgggctttgcccaagttgagtctgctagggaatctgttgtaaacacagatccattgatttgcatttgtcagagagtaaagttaaaccagtgaaaagagaagcccttatccttttatgcagggccagggaaacctttcatattgatcctattgatccaacctttccctttaaggaaaccacatagttaaagaccctcgttcaatagatttacccttcgtgcttgtgatattcctttaagtgttctcatctaggatagctgggcattaagcccacactccaaaccaaacaaaaatgggaaggggggtgggaagagagggggtcaggaggcagaattgtgggaagtgaaattaaatcaaactgaaatgtgtaatgacccagttggggatgtttttctcattcttctaaaatgacatgcagggataaagacaaaatagatgcatttggcatctttttttttatgagaaaagaaaatctgtttatatgcctagagtaaaaatgtctcaggaacatcattttctactgtaaaattatttcaattaagccaccagtttgcttcattaagattggttcacttaaaagcagtgatgttgccacaattattttggttcatttgtagcaaatcagaaaaaggattctccccagaaatgcaatattttggactctgtatatgagcataaacactgaagtcacttgaaaagagagaggatttggagtttttgtgttctgctggatgtgggaagcaacgggtagaacttttgttgtggagcagagtagacgcaataggaattgccagatattgctcagtatccctcttgcttgtagatatgaaaatgtaagtctcatttgcctccagaaccatcggcacaatccatttcatttcttccctgatccttttttcctgtctaaataacatccatttgtgatttttttcaacacggtacatgacctgtttctaattggctatctcttgggttgtttttgtacattcatgtttgttttatgtgattgaaaaatattaatgatttcgtaggtgagctaatgtatttatctgctgagcgagttcaaagggcagagttcagctatggttcaggttaattgaacaggaagcagtgagctctccaggctgtgttgaacaagggatcagtcccttaaaatatcacactcagcaaacacaatttcactgtcttcatcctagagtctgatgtaaaaggctcagatcaacttggatcacttgtttaaaaaaccaaagcaaagcacagtaactgcagcaataccctggagtccccctcggggaagaagagttttctcattggctaattgctttattggtagcactgacctgcagagcagctgcaggagcctggatgaaggcttaggcctcagaataatgtgctccattagaacagggcaaggcattttttgtttactcaattggagctccctgcaaagtgccattaaccccggcccaactgcttgtgtgctgcaaaagccaaaggtcacgccagtcagtctgtaggcatagcagctctgccctggtaggaaggttggggtcgcatcctgctggcactgccctcccaggggctcgggccagccctctgggccctttccagagttttgactaaagcaagcaattgcacaacttgtttacatttcccaactgctgaatcatgttttgatgattaaacagttttgatctgagcaccatcaatcacacacatacagaaaatccccccactgcccctctattttctatttatgttctcttcattactgtgcattacagtaaacagaattgtgcaaacggtgcttttagcaggaatatagttctgataagtgcttggatcaaggggaagacagacctccaaacatggctggggggctgtttggtggaagaaaggtttcaagtggagtcggggagcacagtcagggcttccaccgccagcaggtgaactagagtgccacctgccgggagtcttctaactgcactaagccctgcaccttccacaaggtccaagccccttccttcactttgttcctaatatccttgtccccattccccaccctgcagatcactacccatgcaagcattatcttcctagaagtagcttaaagggctttttcctggtcctttgaaactgtaacctctgcctcttctaattcattgccaaggagaaatcaacagttctgctgtcataggtgaggtgatttgcccatcctgcacattgaggtaatagtctcctgcttagttggactgtgcttgggggaagagaagcaaagaaagcaaaaaatagccgtgggagggaaaacgaatgattatgtgtggaagaaaaatggctccgttgattgtgccagtgagggctgtgccaactgtaaggtgttctgcaaagataaaatattgtacaaaggagagaggatgggagagaattagcatctacagggaggacatcgagaaagagatatgccaaatcagcaaactcgagtttaggctttgtgaaatcccctggaaagagaaaaagtgaaccagccgttttgcaattgcaaagaagtgagccagtgagctagacttcgagccagactgtggagctggctgtagctctgtgggtggcagctatttccacacttgcttcacatggacccctgcctggagcccctggtagcagagcgcctgtgggtgggttgctgcctccacgccccggcgcaggcttcagcaccacgaacagcgccatggaggaacgctgtttgagcgaattggagatggaccctctactgcggttaaatccaggcaagagcctgaccagtatctccagctctgtaggtctcagcgccccagtgcagggcctcatattttcctctggagccctgtggcttttcagctctctgtgtgagatcagcgataataaagggaagaggaggcggcatctgggtgagaagacaaaagatgctgaaagactttccctctgaagaggaagagcattaccaccgctggggggcgggggattgaactatttttctccatgttgctgccttctgcaggcatgattgccaccctcaacgggatgttttagatttaggatttcctttcaagtgttactgtctgcctgcccccacgccccaccccccaggtatacacaaacggatgcttttgtttccccagatgcatgctcctgatttttgaaagcatgacttttattatattaaacaatattctcacattatagcagcagtaatgtcacaaggagaaccaactgtggagcatcaccaccttcgataaatctagaaactggatttgatttcttgagagtctagtgatgaggctctttttaatgaaaaccttgccactgcttctgtccctgaccccctacgaagggccagagatgttgagtgacttcctccaggccacacagtggagtcatatggcactggccagggtgagaactgacagtaggcactgacccctgactctggcctttttcaatcagttgctttgctttatttctggttttattccagagaaaagagataggagagtccttttggtcaatgattgagcacaactcacatctctttgggtttcgagtaaaatggtccttgacttcccaaagctaattaaaatgtaaaactcttgctttatttcaaataactttagttcagacctaatttattgctaaggtggttctcagggaggtagagcattggaatagacaagtgtgtctcctttaaaagtcaagggtatgataaatgagaattttttttcccctgtgacaatttatcttcaagttccaggtggccctttgtgtaaaaggagggaaaatccatcccaaaacaaaacaaacctggtagagcattcaaatttgatgttgaaaaaaattgtttctgtgtgtctaaatgcccaaaattttgttctaaaaatgagcaggaacatatctgaatcagatataaaaatgggtgttaaatgtattttgtaagctttgactaaagaagtttcttccagctgtgtagtcttcgaatctgtggacgtgcctttctcaggagttgttgggttccactgtcaaaaccttttccagtaaaacatggatttggcaacagtaagtgtagcctttttggcctactttatatgcatcactgcatcttactaaaatgaggcattacactctacaaggacttgtactgaatgcatttcctttgtagtgaactcaatatgcttttgaaaagatattttacagaactgccacataaacaagaccttttctattatctgttttgaccctaaatactgaaaagtgtgtggagtaagataattttatgcttttctgaatcagtgccatagatccccaaacctaaaagatgtaggggaaaaattcgtcttggatgcaattgcctcctaatgtataccagagttcatttctgttcatgttcaagggacaagagtgaattctgtattcactttcaatgactaacccttctcatcctttccttcattcttctgaagaggaagaggtggacttcctgttgaagaccaaatcctctcctgccttctcaggaccccatgcttcctgtatatagatgtccctgcttttgtgaagttttctctgtcctcctaaattgggatctctttggaccatccctccctttgcatttagaacatagataggtatcgcctgctgacttgtcagtgtcagcccattagattaagatccagaagaggaggttagatacagcatacaggaggcagccaataaatatctgtgaataagttaataaatacttttcttttatatgacactgtttctacccattgtatttcccccatattattgtagatggcatctgagtaggaatcatcagccccagcacatcatttaggagaagcatttcacaatgtcaagttctcatcaatgtcattttcctcccaaattacgatattataactatgtattaattttaagggaatctcaaagtaggattgagtcttatccaaatcttcagattatcgccagtggagcaagagatgtgaaatgatcatcactagactctagactaaggacccattttgccaattggctctagttaccccaaagtaaccctccccagtcagtcagttctcctcgttttcctgctcaggcattgtcctcactgtcctgtccatgtctttgcacgttctgttccttctgcctggaattccttatctcatcagtccttctccaggtcctatcattcctagccacctccgatctgcctctgaaatcttcccagctaactttggcccattcctttctgtttctttctgaactcgatttgcaatcattgcaaatgacagaacagccttgttggctctggtcttacactgctctctaggtcttttctgtgtctccctttcttccccatggctctggaggggagatagcatatctttgagctccccatggactgctggtccatggctgaacccacaccaggtattcttttttgagtaagtcatttggtggcctcctgtctatctttacagaagcccctattctcaacgagagaataggttgggtatgtttacttacatctatcattcttttctagcttcttctctcaaaagggggtattcttttcttattttatttttttgatctggagccgtactttgtcacccaggctggagtgcagtggtgcgatctcggctaactgcaacatccgtctccagggttcaattgattatcctgcctctgcctcctgagtagctgggattacaggcacctgtcactatgcctggctaatttgtgtatttttagtagagatggggtttcaccatgctggccaggctggtctcaaactcctgaccttaagtgatccacctgccttggcttcctaaagtattgggattacaggcgtgagccactgcacccaacctgaaaaaggggtattgttttctataaatgctttggtcattgttggaaatattggctacataatttaaaatggatttctatgttaatctgaaatgagacataagcttaatatagagaaacagggcttgtgatgtcttcgttaatagcaaaggttgttctgcttcatacaagatggaaaattttacccacctcagggcaattgtgccagcaattatatcagcaaatcagagggactgctttcctattttaagtcattttaattatcagtaaactaaacttgcatctaaacagccattacttgagatactgcaagtgcttaggttgttaataacgtaaagttacctgtgaagaaaaaaaacagaggttaatatttttatctttttattttattttaattttatattttattattttcctttgatgaatccattgctgcctacactgtactgaactaagtagttgggagtgaaaatatatgaactagcccttgtccctttttgactttactgtatatttaagatttgaatggatacatcctcacttacctttacatatccatatggaattgagtgagaacagagtttattactatgtcaactttagttggaaactgaaactaagatcatttatttgctatacatcttacgtggaaattatatattagctcgtgatatttcatcttttttacagttatgttttgacgttcatattacatgagtaacaaattatgaagactaaccatttatgaacagaatttagtgttaaatgaaagcattccagatttttattttctgttgccttgaattgaatgcattgctgtgctgcatgataactaggtaagcaattgacctgtgtgactgtcatttctgtgccttgcataaccaaaccaagtttcctctgacactgaggcagagacaggcagggttgcgctgggcaggaagcagctctgaggcctccctgaagggccttagactcccaatgggggagtcagaggccaccctgttctctggctacggcaccatagcctagacatgggtgtcaccaaaggctatacacttctttacctccttttctgccctcttcctaaaggaagcatctggaaccagaaggagtccatatcgctagccccactcctccctaaccagttctccatcccgagccttagattcaggcttgcataggcagattctggaaagtccattaaaagggcaggatgtggagtaaataggtgattggattggagggtaaagggcggaaaattcacagcagagacaggtggacttttctaactggataagctacaccaactcatgaatccaagtattccacccctggaaagcaagaggtgaaagcaagttggttccattggtgaaagcaagtcacctgcctgagcccagagacagggtggaaaggctctacaaagttacatggcaggaagcatgggcacagaaaaggcaagcatgaggaatggggggggcggtgttggtgtttttctttgtttgtttgttttgttttgtttgcattctacctcatgccatgtattttagctcatttattcttggaagctgccactgctatggtgatacacagacatcaaggatgtccaatagtatagggctaattttggcaacacagaagataagtgtgggggtatttcacattcataagtaacaaacctatgcccacctggacaggaaccacgcctctttgtattgagactgtttgtgacatgcttgatcttctcgactagatcatagcaagcagggaccctgagctttgttctcctgcatcttccctttagccccaccacaatgcctaacacatagtttgcacttagtaaatatgcaaggataaatgatccccagaatcccactgctctagtgtcccaatgggagatcccctcaagacccaccaggtgattgcttgtagctcaacctgtattttattttattttattttattttattttagagacagagtctcactctgtaacacaggctggagtgcagtagtacaatcttggctcactgcaacctccacctactgggttcaagctactctcctgcctcagcctcccaagtaggtgggattacaggtgcccaccactatgcccagctaattttcatatttttagtagagatggggttttgccatgttggccaggctggtctcgaactcctgacctcaggtgatccactcaccttggcctcccaaagtgctgggattacaggcgtgcgccaccacgcctggcctcaacctgtattgtaaaatagggtttcactttaaacttttaaattttgttctactacaataattaccaaattccaggggagcaaaggtccaagcctgttgcctacagaattaaggcatccaattcagatctcaattattttgtgttaagaaaatctaaacaaagcaaacactgcttagggtttaccaatgaataaagaagcaagttggaagggatatcaaaaagatcaaaatgtttgcgcatttataactttaacaatgtctaagtttttttaaacttaggttctacatctggagcatacttttttaaaaatcataagcagtgttaaaaaatacttgacagttttgtcttgattcttaatgtgggtgttaagggatgccgtccattagtgagtacaccccagatcatgtgtttattgcatcctccttcttccctgcctgtcccctaatgatctggtgcacagagggctacttgagctgagttatatggatctcagttgctgtcatttgcacatacttaattcagagaggtgatcacattgatttccaagacccaatttttaagacactgtactcacgtagatatcttagctgctctgactatgttgtctgaaaaggaaaacattttaagcctttggaagcaattttgatggacatttcattgtgttctatattactcacataattaaatttccttcaagtcaaagtctgtttaaaattaaattgagaaatatttttgagttccatcaggcagataactttgtttagctagatttgttctgcattcacatgaaatggcgtcctacgaatcaatacccagtgctcacagttcccctgaatgtgaagaaatggcacccttagtagttcttgtgtttttatgcctatggttttgcaggctggtttattcagattctgagcattgtgaactaaattcataacttctttcatgcattagccggagtcataggactctgatttacagactcgcagtccagctcacagcggctagctttctttgggtcataccagagtttcatctgcatggccaaaggggtagaattccaacttgggtttgaaagcaaataggataaattgtcagaagatgtattcctgtgtacatctttggaaacaagacataggaacaaacccttatttttcaactccacccaccctgctactgaggacagaagaacaagccctcctcatcttttatcctgcctctccttgagacagccattccattaaattctatggcgagggaatctatggtgttcgagctgtaattgaagaattagcattccataaatgctgccttaatttttttaaaaaaattgttccaaagaactgctttttgttgcattgttaattagcctttgaacatttttgaattcattataaccttcaaggtctgccaaggtctttaaggtttcttctttatggctttgcctctaaataacaataggtacattgtaaggttattgtgagccttaagtaagttaatgcatacagatgcttagaataactggtaaatagtaaatacttgctaaaatatctgccattattgattgattgattaattttttgtaacttctccatatatcagcaggaaatttggcctgagtcaccaatgttcccatagcttttatatattaagaatattgcttggcattgtcaatgacagcatgagccaaacagatccagtttgtatctgagccaccatttactagctctgtgatgtcaggcaggggacgactcttgaagagcctcagttccctcctctgtaggaggaggacaaggtaggtcctgacgttatctagttggtgtacagattaaatgagacgccataagggtatatggcacctggtacattgcctcctatctcctcagttttacagctaacatcctattacacatgggccacatctgtacttcaacataaattttttgtcattttctcagatgagatttaggatgagtgagattgccagactctacactcatcactgggcatgctgtttgcaaactggccaaccatgcagccggactatttactccccacccccaatgtccttttaagactcccttaacagttatggacattttgctaagctcgtgcttagaacccagaagttgactgtgcacacagtaggttctgactgaatccctacaggcttagattggaatacagtccattttgcaagtgtggtatgtattgagcagacattctgtatttgatggaagttcacatataaaaatggcaactgagccaacaaaactcacatcatctgtctctataatgatcacaggtttggggggccttatcagaaagttatttttatagacaccccggtggtcatgagatttaaaatgctaaggagaatggcttcctctttaacctcttttctgtttttgatatgtctgggccctgcttctttatcttgttccccaaatccattcacttaggttctgacttggctccctggagagctcctgttttggttcacaccatcatctttattcccaaattaggatccttaacaagaaaagagaaaagaaagaaaacctgtagacatccagatgttgctttttctgaagtaacaactttatttgataatattttgaagccatgggccaccgaattctcaacatgcaagtttatttaaacagtctctagtatcctttcctgaccccaaattactttcaagcattaattgtcctagtggtttcatggccatattatttcatattcattagtgttttcatgaaaaattataacactaattagagtggcttccagttaattcacttggtgattcattactctctccttcttggtgatctgcatgtggtcatcctggagaaagcatccaagggtaattgcagctctattccctgagtgattgcctaatgccattagttctgatccacaggagcatctcgggaagctctgatggggtctggttacagctgcacccttgtcctgccctttggatgcagggagaaagggaagcctgcagtgaggactggtcctccggaggggtctagggaaacagaggggagggacgtcttagggaaaaggaagtaggggcaggggagggagttcagggatttgaacatcactttaacatcttctagaacttgggtaaggacagtatagagtaaaatctgccctgagaacttgcacgtagagtaaggaaggtggtttctcttcagtttcagcagacttgtggccaggcactgagctggagtttggaaacccggttccctctcagagctctgacatccagttcttccaactgaaagtttatttgacctcattcccattaggatggctgctgtaaagcaaaatgaaaacaaaaaataacaaatgttggcaaggatgtggaaaaattggaaccttgtgtgctgttggtgggactgtaagatggtgtagccactgtggaaatagtatggcagttcctcagaaatttaaaatgtgagttatcacatgacccagaaataccacttctgagtatacactccaaaagaactgaaagcagggtctgaaagagatatttgtacacccgtgttcactgcagtgttattcacaacagccaaaaggtggaagcaacccaacagttcatcaagaggtgaatggataaacaaaatatggagttttcatacagtggaatattatttagccttaaaaaggaaggaaaatctgacatatactatggtctgaatgagtcttgaggatattaagctaagctaagtgaaataagccaatcaccaaaagacaaatactatatgatttcacttatatgaagtgtctagaatagtcaaactcatagaaacggaaagtacaatggtgcttgccaggtgcctgagagagggaaatggaaacttgtttaatgagtatagagttttagttctgcaagatataaaagttctggagattgtacaagaatgtgaatatacttaacactatggagctataaccttaaaagtagttaagatggtaaattttgttgtgtatattttaccataatttcaaagaaagattgtttgttatttatattgtattgcttgctcaatttttaaaaaaaattaaaaatagaaaaacaaaaagccaggtgcggtggcatgtacctgcagtcccagctactggggaagctgaggtgggaggattgcttgagcctgagttctggactgtagtgccccaggcccatcaatgtcctcactaagttcaccatcaatacggtgacttcctgggagtggggtatcaccaggttggtgagggaaaaaacaactactgccatgttgctttcagttcttttggagtatatactcataagtggtatttctgggtcatgtgataattcacactttaaatttccgaggaactgccatactatttccatagtggctacatcatcttacagtcccaccaacagcacacaaggttccaatttttccacatccttgccaacatttgttattttttgttttcattttgttttgacagcagccatcctaatgggaatgaggtcaaataaactttcaactggaagaactggatgtcagagctctgagggggaaccaggtttccaaactccagctcagtgcctggccacaagtctgctgaaactgaagagaaaccaccttccctactctatgtgcaagttctcaaggcagattttactctatcctgcccttaccccaggttctagaagatgttaaagtgatgttcaaattcctgaactccctcccctgcccctacttccttttctctaagacgtccctcccctctgcttccctagacccctccggaggaccagtgctcactgcaggcttccctttctctctgcatccaaaggtcagttgtgtttgctcagtagtgggatactgcctgtgaatagccactgtactccagcagcttaaaactccatttcttaaaaacattttttatcaaaagttctgccactccactattcacaatagcaaagacttggaaccaacccaaatgtccatcagtgatagactggattaagaaaatgtgacacatatacaccatggaatactatgcagccataaaaaaggatgagttcatgtcctttgcagtgacatggatgaagctgaaaaccatcattctcagccaactatcgcaaggacagaaaagcaaacgctgcatgctctcactcgtaggtgggagttgaacaatgagaatacatggacacagggcggggaacatcacacactggggcctgttgtggggtagggggctgggggagggatagcattagaagaaatacctaatgtaaaagacgagttgatgggtgcagcaaaccaacatggcacatgtatacgtatgcaacaaacctgcacgttgtgcacatgtaccctagaatttaaagtataataataaaaaaaagttctgccactcaaagagaaccacattaatattttgcttttattaaaattatttttaattatttaagcaatgcattaaaacattctacttataaaaatcaaaacattaatgatcagaataaagtcctctttgcctatctcctttaataccagtcttcttcattacttcccagcagtaaccactcttctggctacaaagagtgggtctgccaatccaggcacttccagtgcatttatttacctacatatgtactcatataaattgtataaataggtagaaagacagatagatagatcgataggtatcttaggtttgcgtattgttttcacataagtggcatcacactgcatgcatcattccaaagctccttctttcctttgatagtatgcctacccagcttctacatataaatgaggttcttgcaacccacatttattgcatagtgtcctatggcatgactattttcatttatttagccatttctgttttgatgggcaattaggctgtttaccatttttggttgtttgcattatttgctaagcagtgatgagtgaacatccttgtacacacctccctgtgtacccatgggaatgtttcctagggtggacaccgagaagcaaaatgagaggtcatggagatgcacatactgtaattttgataggcactaccacactgtcttcgaaattggctccccatcagcagtggaggagagagctcctatttccctgacacttgccagaagttaatatattagccattttacttttttttgcatagttgctggatttaaaaataacattttgtggttgctttattttgttatatttttatgatttctaatgaaccttgatataatcatatacttgctggtcatatatatttccttttctgagaatgtcctgttcatatccttgtttggcattgttttttatatattctggatgcaaatttttgctttacaaattacaaatgtggtctcagttctccagttaaaaggcataaagtgattgaatggttaaagaaacaagacccatctatatgttgccttcaggaaacccacttcacccataaagacacacatcgactgaaagtgaaagagtagaaaaaatatttcatgcaattggaaaccaaagaagagtgggagtaactatacttatatcagataaaatagactacaaatcaaagactgtgaacaaagatgaggagggtcactacgtaatgagaaaagggtcaatacagcaaggggatataacaattataaatatctatgtgcccaacactagagctcccaggtatataaagcaaacattaatagatctaaagggagggatagactataatatattgaaaacattttatcccatggtattattttgaaacttaataaggcttcttttaactttgatgtatcaaattcatcttttttattatttattttttatgagacagagtttcactcttgtcgcccaggctgagtccaatggtggtgcaatcttggctcactgcaacctctgcctctgggttcaagcaattctcctgcctcagcctcctgagtagctgggattacaggtgctctccaccatgcctgcctaatttttgtatttttagtagagatggagtttctccatgttggtcaggctggtctcgaacttctgacctcagatgatccacccgcctcagcctcccaaagtgctgggattataggcgtgagccaccatgcccggcccaaataaatatttttgttgctcttcctttactttatgtgttttgcttcttgggtcatttttatttattttatttattttttagaggcaggatctcactctgttgcctaggctgagatgcagagccccaatcatagctcactgcaacctcgaactcttgggctcaagcgatcctcctacaaaagcttcccaagcagctaggactacaggtgcctgccacctcatccagctaattttattttatttttttcatacagatggagtcttgctatgttacccaggctagtctcaaactcctgagctcaagcaatccccccacctcagcctgtgtgctggggttataggcgtgagccaccatgcctggccttgggtcatttttaaacatttgaatctttattctttaatttttctgaagttgctttttataaattatgtgaaattggaatctatttttttaaaatctcaaatggatagccaactaatccaacagtttctgaacaattcatctcttctcactatttgaaatgcaatactttctttataatatattatattcccttatgtacttgggtcagtttctgcactccattctgttccatggatctattaaattctgtgtcaacgtcatactatttaaattatttttgctttatgatatatcttgagctctaataggatatatattttctctcctcatcttctgtttctacatcttcttagccttccttgtattttcacttttccataggaattatagaatcagcttgaatttatatattattttgatcttctcaattatacatagggcacagagttctattcattcaaatcttttttttttttttttttttgagatggggtctcactctgttgctcaggcctgagtgcagtggcacaatcacagctcactgcagccttgacctccctagctcgggtgatcctcctacctcagcctcctgaataactgggactacaggcacacccaccacacctggctaatttttttgtattttttgtagagacagggtgtcactctcttgcccaggctggtctcaaatgcctgagttcaagtgatcctcccacctcagcctccctggcattatggcgtgagccaccacgcctggaccccaaatctttatttatgtcctcagcaagtaaaaataagttttagttttggccttttgatcttttggttagagttatttctagctacttgttactgttgtgaaggtttttttctgttgcgttttggtttcatagttctttatactcaagtatcctaaccactatagtttagtgttgctgttttttttttaacttcatataaacagactcactatatgtgtattcctttgtgtctgatttcttttttccaacattatcttcatgctgttatgtgttgctgcatgtagtagcagtcattccttctttttcataactctataatattccactaaactcatatgccacagttaatcaattctcctgtcaatgagcatttggattgtttccagttttactacagagctgctctgaacattcttgtacatgtacatgcatcctaatgtacttaaccatacatttctgtggggttttcttaatttgagtttcttcagaagcaaaccctaaaacaagaattcaagtatgggtagtttatttgaaaggtgattccagaaaacactagtaaaagagtggagaagcaagacaggaaagggaagaagcccaataagagtcacttcatgaagcacattagtagagtgggcaaatggagcttaatcctgctgagtaactctgtgaaactccagagaaaatatgccttagagttgttccagctgaagaacaagggtgctggggtatttatctggcagctccaattattccctaattgaggaaatctcctggacccttccccagcccttctggcctgcactgcatgtgggcagggcaggctctggcagccagacaaagccctcaggcaaagagctgaaggtactggcagttagaagttgggctgtcgtgccccgcagtggtgaaggccaggagagtgtggcagcacatgacagagtctgctacaagagagtctttccatgagcagaatttctgggtcatagggcacatatatattcaaccattgcagatactgccaaacagtcttccaatctgttgtcccagtttgccctcccaccagcagcctaggagaactcccgcaaggctgtgtccttgccagctcttggtattgacttttacatttaagccattttgataggtgtttaatgttgtctaatttgcaattcctggattactgataattttgagcatcttttcatgtaatttttgaaaatttggatttcttctgtgaagtgcctgttcaagtctcttgcctgtttttctattggaatgtttggcatttccttattgatttccagaagattttatatattctggattcaggccctgtggcagacatatgtgtttaagatatctgtggctctcctttttactgtcattcctgtcttttgaaaaacagaagttcttaaatttttttaagagacagggtctcgctctgttacccaggctggagtatagtggtacgatcatagctcactgcagctttcacctcctgggctcaggcagtcctcctgcctcaaccttccaagtagctgggactactataggcatgcaccaccacgctggctaacttcttaaaattgttttttgtagagacagggtctcactttgttgcacaggagaagttcttaattttaacgggccccaatatataactatttctctttgggctagtactttttgagtactaagaaatctttcctgtgattatgaagaattaccctatgttattttctttctttttttttttttttttttttttttgagacagagttttgctcttgttgcccaggctggagtgcaatggcccaatctcggctcactggaacctctgcctcccaggttcaagcgattctcctgcctcagccttccgagtagctgggacaacaggcatctgccaccacgcctggctaatttttgtatttttagtagacacggagttttaccatgttggccaggctggtctcgaactcctgacctcaagtgatctgcccgcctcggcctcccaaagtactgggattacaggcataagccactgtgctcggcctaccctatgttattttctaaaaactttattgttttgccatccatactaaggtctgtaatccatgcagaacttattttttgtgtatgacatgaggtaggggtcaagaattacattgtgacacaatgcctatccagttattccaactccattacaggagagaacacatgttcctcatgttctgcatatccaaccttgtcattgaatccagtgtccatatgtgtatggatctatttctgggtttctgtccttttccactggtctggagttgtatgtccttgctgcagtattacaccatctattgtagcctcattaaagatcttggtagttgaaacagaaagttgtcctacgttgttcttcttcatctagaatagcttaactgttcttcgatttttttgcattcccagttaaatttcagagtcagcttgtcaaactcaaactttctttcctttcctcttgaaaggaaggaaagaaggaaggaagagagggagagaaatctgctgggattctgattagagattgcattgtacctgtagatcaatatggaaagaattaaaactcttcacaatattgagttttccaatcaatttatttaggtattctttaatttctctaacaaagttttgtagttttccctgtcaatgtcttgtatacctattgctagatctattctatgtacactcttgatgttttgatcctattgtaaatgatatcattttcatttactgtttgatgtgttatggagaaatacaattgattttgtctactgacttgagtcttagaatcttactaaattctcatactaattctaacagttcattgtgtattctcgtggatttttaagtacacacaatcaatattgattttctatgttcatcttgaaactggccaccttactgaacttttttattagttctagtaatttgcctttcaaaatcttgagttttctaggttacaaaaccaaaaaaaaaaaaaagtccctcatattaacttataattatgaggattctgtttctggctgaagacgctgttaagtaaaagaagtatggagtcacactacctgaatttgactcccagcctgttatttactatgtaactttaagtaatttgcttaatcctctgtaccttggtatcattaattataagctgcctcatagggtggttgtaataattaaatgagtttatacacgtagaattctgcctgtcaaataatgagcactcaacttatgtaagcttttgccatttcatcagtttcctaaattcctttataaattttctttctaaattttcacttcttatttattttttcttattttattgtattggctccttttccgatataacattgaatcatagtggtgcttacacccctcatctgaaatttcaacactttgaaacatttctttctagtattttttttgttttttgtttttttgtttttgtttttgtttttttatataggcatgttgttttgttttgcttttcatgtttgacgtatctgaaattgtctttgactggacttccaaatctggtggtaaactatgcaagacagagatacttttccaaaggaatgtcttttgttcaaactatattattcacataaagatgaaaagtaataacgaaacaatttgtttttaaacattgagatttggttgtgaatggagacaccgaccctttttccttcctgcagattcattagtgtagtcttaacaaagaggtgctcttcattcatgtaataaaactttttaggatgtttggaaggagctcagggatattcgtagccacatagggctgttggccaattcttttttaagacaatatcacattcttgagcttttaagtttgattaaattcttagtaagctagagtatgtcttcaagttattttcatagaaaatattttcatagaaaattttcatagaagttattttcatagaaagcctatagttagaatttttgagtcattaaataactaagaatgcctttctacgggaaagaccacctgaaccacataaaattctagcattaccgccacagtgtcagttttgctcttaatttcctccaatgccactactgtatttctcattttcctgcaaattttaaaaatcttactcctctttttttgcggggggcgggggttgtttgtttgttttgagacagggtttcattctgtcacccaggctggagtgcagtggcatgattgtggctcaccacagtctcaaccctctgggctcaattgttctccctgcttcagtctcctgagtagctgggaccacaggtgcacaccacccacgcctggctaatttttgtagtttttgtagagacagggtttcgccatgttgcccaggctggtcgcaaattcctgggcttaagcaatccgcccgccttggcctcccaaagtgctgggattacaggcatgagccacctcatccagcccatcttttgtcttactactttttcattacatatggttacttacaaattgctattttcttcttaataattttctgttcctgtttcataaaagccacctctttttgcatcatattgttatatcaaatgattctctaaaatgttctttaagtttctggaagatattatctggtaaattttctctggttttcagatgaggatccctttttgtcttctactattttttcaattgtctctttttcctgtttattcattctcaaatgagaagagacccattctggcttgccatggtcaatagaaagggtgtatgttttgctcatgacctcttttctggatgttagtgcactcattctctaagccctatactaaatcgccagttgatacacctaaccaagcttccatctaatcagcttccttgttgtgtggccctgctgaactgatgtgcactcatctcctgcatccgatcctgggatgctgagaagctgatcaaatggaatacacacgacaacccccggtatactgcacatcgagggctcctcttgtacctgtgctcaccctgagtgctctggaaactacttctccaagggagtgatgtaccagccttggtgtccctcctccaccctgcagttttgttttgttttgttttgtttttttgcctagttgttttctgagagttgcagttcttaattggcaggtggaagggagtggggagtactctggctctttcaaaaggcagcacctaccaagtagatggatggctgctgaatttaaatttctcaacagttggaggactcagatgttattttttcaatcctgatgtcccatttcaacccagttccattggccttggccttgtgtttaggtaaaaaatctccagatcccccaaaacagactgactgcagtcctggtttttggtgtgctaagttttgtgtttcattacaggacttcgagatgattttagcagaaagttgaagaagctgccccatgctctcctagccattttaagccagatgtttgtatctggaattaaatatttgttttagcaactcacgacttcctggatggcttacaggaatgcagcttggcagcagagctaaagatccctctttgccaggcttctgcataggcagaagagatgactgggaattgtgatttcaaaggctgagtgccccaaactatttattctaataggaaggtgggaaataaaagccccactggactagacaggagggaatatgggttctcagggctgtgtcactgcataggtgaccctagctgggagttctgatctcttatttctaaaaacaaggttagaccaagtgctctctaaaatcctgcctttctaggagtctgtggttttagcagctgacctagaccatctgctattagaagcctgttctttgaggctactcatgtttgttagagcctctgctggagagaagcagaagtaagaggtacatctccactcggtgtacaggctccagtgtgcttcctacaggcagcacctgcgggcagctacaggggcctgaaccttcccctgggagatctgcccaccaggggcactctgggcctttttcaggccatgcctccatataagaaagtcgtgagacatccaagagccctcatttcctgagtccccttcagtgactttgtattgaaagtaaaaatagagacaggaaataaaacttgtttttttcagagaatgtctttgaagcttgggaacacagaatggtcgctgtgcggtctgcctccagccgacagtaagtggacactggggagttgctctagcgcttgtcaagaccagcttcgacatccaagtgaaagcagaggcggcggtgtggagaaagagcagagatttgccattgatcatccacatttcctttggttttttttttgtttgtttgtttgtttgttttttttcctaagacagagccttgctctgtcacccaggcgggagcgcaatggcgtgatcttggctcactgcaatctctgcctcccgggttgaagtgattctcctgcctcggcctcccgagtatctgggattacaggcacacgccaccacacttggctaattttttttatttttagtagagacagggtttcaccatgttatccaggatagcctcgatctcctgacctcgtgatccacccgcctcagcctcccgaagtgctgggattacaggcatgagccacctcacctggcctatcatccacattttctagatgagaggaagaatgtactacaggaaatctccccaggatctgagatttgtcctgtgtcagaggtgaagcccaagacacggctcacaccgacattccagggcagtgccaagccttcccggactccgggcagctcggaacttggggactttgcccccaccctccagcatctccagaatgaggggagtgtgtatgtgtgcatcgtgcatggcccctcctgccttcttgttccttctccctcctgtctcctttttcctcttgctccgccattctcccgcccacaatatctgctctaataagccaggcggcagtgctccaactagcccataggtggttcacgctggagtaccttgtgcaggataatttgccaaatgggttagaggtctgtcttgcaaggcctgtgcatacatccacaattagaagggagtgaaaggaggaggggaacctaacaaccaagaatggctccacatccatttgcacagtgtccaccctgtctctgcccttggcctcccaaatggatgttggtctggacgtcactggctccgctgcctgtctgtattggcatctggtacatgaagaccaagtttctgaggaaagccagctctcaaccttgaaacaaagccattaagtttctcatctgactcagatcaggcacgtttggagaaatgagggccaagttagagtttagttctagaggtggttgggggcggagggcaggttcatggtactggctccatggtcatctgaacctaagtggcctttggtgatgcgtcagaaatcacaatgaagcaaggaaacctgcaaggcatctaactgggaactatttatagtttccaaaatttagggagcacaaaataatccaataatgattttaagacagaccctccccatccatcaaggcctggctcctcccaggtgggtgatcagtgcttctggcaccagctggccctgaatggccagtggagctgcttagagcctgagccccaagtcttgtgtgttaggccccctgctcccagggtctctgtggcaatgtgctggcacctaattatttgctgaccctgagaagcatgcattgctgagatttaccagcatttatggcttactgaatatcaaatatttattagcagagtgtacagttattctattttctttcttccttgtttgaattcaaggaatcttattatttttactttaaaggctcttgatcatgcagattagttccaaaggaagggttctctactggacaccatcacctctcccatagtcttgtcattctatcagtactgaagggccaccagttcagagcagggaagtgaaggggggttatttccattcttcttacctcaaacacctgtaggtttctcagggaacaagcccagaggtacaaatgtgaacctacttttgtaattgatttttccaacataaccccaattgactgccttagttaatctttccaacagaactgcaggccctatgtcctcccgggagagtgccctccttagtggaaagggtcacgctccccactttgcacaagccttcctaggagggaagctgcgagctcttcagctgaaaagcgaaaaggcctcttctgcaggtgtacttttcaaacctgtatccttggaggttaagtgtctgctgacaaatgcacaccctggatggtctctctccccactccccacccttgccctgacaagatcacattgaactattcagggaaagtatttactgaatgcaaggagaatagagcacttctgcattatttattaggggctaacaatacccatcatatgtagatgatattgatacccatcaatgtatttggacataaattagtatgttaggaaactccagtggtccaaaaccttttaggatctctgacacgtatgtaaaaacacgtcgtagtcttacctcttatatgaggctgggaattggctatgagacaacctcacaaagaaaacaaacatctttaaccttttatttgccattagccctctgggcagttcatctactatcgagtaagacttgaaatcatgaactcttaacctctccttacacaccttctttctgctttctctaaggaaggaagaatgttcacatttcctgagtgtctactctgtgccaagtgttacagcaagccttttgatgtcctggagtgctggacattagcatccccactctataggatcaggaaactaaggctcacagtcctgcagctgataagtggctgacaaggagtaggaaacagggtcttggcttccatctgagcttcttacagtacatttgactcacccctgggcaggaaggcaaaggtcattcttggcttctgtatcagttacctgtcaccacaataatgctgcaaaacacagaaccacagcatgggtgatataaaacaataaacatctatttttgcccagaagcttgtttgttggctgggtgtgtctgctgatacaggccgtgcttggctgatctcagctggactcaagtgtgcatctttagtcagctgctggatcagctggggctgtcccgtccaagatggccttggccaggacagcccatccaagttgagtggggagttccagttctggggcagcgaggactggaagattctgacccggtgttgagttgctcttacttcacaggcttcccagaaactgtggaggctgggaaggggttttccaagatcaaatccaggatccagtgctaattgagtcaccctaaacaaacgtgtttccttctccaagagtaaaatgggaatccatacctctgccccatcttcctttcagagatgttgtgaaaagaaattcccaatgggggatccagactttggcttccactgggactcacctcactgtgccttcagttccttatgtgaaactgacaaccctggactggacaaaacactgaggttctatggctctgtgaggaggaccaagctaagggagataaaagatgttcaggtgccttgaagagctaacaccactgcacctgcggaactgggtgtcaaggtgacatgcggttccagggtaattccccaacctgtatctgcctccctgaaccaaccagatactgtcccccttaccttaccctccacaccacacacacacaaccacacacacacacacacaaccgaggtcagtctaccctctgttcgggaatgggccctcccccatctctctccttgcttcccctccccaccagcacaaaggccctggcttccaacaccccattactgctcagcatccaaatatccaaagacttttgttactagaaggaaaacgcacgatgcgtgacaagcagcctttctggccggggaagctactctgttactgaccacgcagtcggtggcaaggtccctccccaagctgagagagaagggagagcacaggacaccacggggccttttctgtcctccatgatgttctccagtctcacacaatccctcaccctgtcccgcctccctttgcatcccctctggatgggaatcatccctggcttgatgagcgttgctgcacgactctgaccacatacctttgtgctgcccatgggtaggcgatggacagggccagggccggttagtctgggtgtcagagggcagctgagctcctagaacgcccaggagcagccactctggaggcaaagtagacctggcccacatggagttgggttgggatggggaaggcatggagaaagggtcagttgtggagagacattctctctctccaggttagaggtggggaagatcagctatggggagcagcacattcttggaaaggcactttgtttgtcctgtgtctgacctcctgaggggcaaaaatccagtggccaccagggagaagcaagttggtgtctgaagatctcagagagggcttgtgcccgaggccagggcttcccttgttttaccctgggaacccagtgttttgaaaaatttatctaccaaggaacctatatttttaggcagtagctgtctgccatccttgttaatcacagattatacacagatgtgtacatgcctgccagtaccaggtcctgggccacaggacacaaccagcatgaccaatctgagtcaatattatttctttcaaaaagtggggaaaggtagccttattgtaggtaaacaaatgacttctcttcgagtctttgaaatggaagcgagcgcttggccttccatgtggtcctacataggacctgcttccctgtgagagggagggagctcaagaatgtctgagggcttttgggatctacacccacctccccatcaggcagtgacacatcagctcctggcatgccctccctgctttcctcctaaaagagagaggagaagaatcagatccaaatggtctagacagggctgggctaaccttgcaccttccgtggcagaactggctttgagcagttggagttcaggagaccctgaccagcatgtgactgtgtcaagactgaatccatcaatgccactggaacacctgctgtttcgttgggtttctatcgcatccttgggttggagggagctattgacactttcctggctgttcaaaaatgggcacatgtggactatagagtgtagtaattgaacagcaccaaagccgtttgcactctgcttgtgcctgcaggcacacctggctccacagcccgggtctgaggatgctgaggtcacagcctcacaccagctcccagacgtcattggatctgtctcctttttcttaggctttcaaggcaggtgttctccctcctgtttttattttcctttagctcctgaccaactgcttttgtcaaaatcaacagctggcaattgctagctataaaaaccctgggcaacatatggacatactgcctcattatttagggcatttgggcttgctgtacacttctagactgcaagctacagctttgcatttgttgctgtggcatctggtggcttccaaaggctgttgggaaggcataggcaggatgtattgatctgttctctctgtgcagtttgcttcacgttaagtctttaatatttttatcttaaatatgtgtgtgtatatatatatataattttaaatatatgtatctcacacaaaatataatccgacaagccaatgtggacctgtacccaaactgtctaatcaccctattaaaagcacaaatacagcattatctgaagaataatcaatattggtatgaaaattgagagctatgtggttaatccaaaggagcgtgaattgacagaggacctcagccaatgtttgcagaagatatttgcctggattttgttatcaggagattatcatgcatcactatttattcagaatcctccagatgaaggcttgacaccagttgtcccaggggtagggtcagggacggttgtccagggacctgaagtggcagtaggggcaagcatagtggtttctacatcttaaaaggggctgcagaggtttatagaagcacagattccagaaccttgccccacatggtgaaaatcagaatttctgggggtggagacccagaggctgccctgcaaagagggcccctctgatgtgcagttgggtatgggtgccattccctacaagagaagtgtttattctttctttccctgggtctgcagcaaacctgggatgcggtgtcagtgtcatcacatatactccaaggtctccatgtatttccttttaaaatgaaaatcatttttcctgatttgcctagctcagagttactggggtaatacaatgagaaggagagtatgaagtgaagaggtacctgttatctcacttaagcctctctagaattgaacatttttatttccttatttagatgaggaagacaggcacaaagaggctacgtaatttgcaaggccccaggtcttggaggtgtggaagcccaggtttgaatccagagctttccattgcataacatgctcctctgagactgtagaaatcaggcagacccttgcaactcaaaccgaggcatgtggaccagcagcatcagcatcacctgggtgctcatgagaaatgcagaatcccaggccctgtccaggctgaactgcatgagaatctgcgttttgatgagccctccaggtgattcctatgcaccttaaagtttagcagcactgctgtagaggacttcagattgagcaagagagagtagacctcaaaacaaggttcccctgcaaaggctatttctgtgtgttaccaccacacaggaatcatcagaatccaacaaaaatatgcagtcttcacaggaatgagcaaagaagaaatcattaccggtaagctgttggaaggatggcagtgagcagtcttagccctttctgtctgagttcccactgcaggggaagcgctcctcatccaagaaagccaaaaggccccaaaagaatgagttttaagatgaaaacaaattgtttttatgtggatgtgttgtgtgtgtttaattttgaagacaatatgaatacttttagaaatgagagaaggaaaaatcaggaagaaagtttagccaagctgatacagcctagcagctttcccattcaggggctctcctcttcctgccctttgagagtatcagtgcattttgattatttcaggaatgattcatttatattactttatagcacacagcatccagcagggagggcagccagttaggtagaaggaaattcagcttccaagtatctttcccgtaagtgtttgtcttcaggttaaatcctgtcttagtctgttaaggctccagtaacaaccacaacaacaaaataccgtgacttagtgcttataaacaatagaagtttatttctgacagttctggaggctgggaagtctaagattaaggtgccagcggattcagcgtcaggcgatagtctgtgtcctggttcacagagaagactttctcactgtgtcctcccgtggtagaaggggcaagaggtctctctcaggcttattttataagggcactaaccctattcctgagggctccaactttatggcccaatcacctcccaaaggccccacctcttagtaccatcaccttggatgttaggattgtaacatatgaatttttggggggacataaacattcagacaccgtagcagaccgtccacataagatgctgcctgcagaacacattgaacaggaaatgcagtgcccgaaggccaggaaacaaaatatacaagccagtgctttgagaaacataggaaagcatctgagcagcaccctgggtgccagtcttgggggaatgtcagtccactgcaaagggattctcaacctctggccagaatatccagtaggatggattctgagggcgactgccccatctgggcctctgctccttcctggcctttccccagtttttcctgttgaggccacactgtcaccacacccctaggggagctgggacttatttcaagtgattttttttttttttttttgagatggactctcaccctgtcacccaggctggagtgcaatggcatgatctcgactcactgcaacttccacctcctgggttcaagcgattctcctgcctcagcatcccgagtagctgggattacaggtgcccaccaccatgcccagctatttttttgtatctttagtaaagacagggtttcaccatgttggccaggctggtctcaaactcctgacctcatgatacacctgccttggcctcccaaagtgctgggattacaggtgtgagccactgcacctggccatttcaagtgattataacacacgttctcatgttttagcattatgatttgtaatactgtatttaacctttacaggtcacttttctgagacaccgaacctgtctgtgaagtgtacagattccctgaaagcgtcaagaagccatttgtcctcattgtcccaaacattcattgtatccatggctccaaaaagaatcagtcaggaatactacagaggcctggttgctgccttctaggaacttgtaggctaagggagaggtcgtgacacataatggccttgactgcatatgtcagcccaggcatggatactcacttctgctaaatcaaagagactctgcatatactaacatgtctacaagcctgaagtcctattgtaacattgggcttcttcccccaccctcatcccctgtcttgtactagcttccaatttcaaactagccaaatgagaattggctaaaccaatttttctagtctttctctcccttggtcttctgtttgttttgttctaatttttcaaaagtctggacgaaaggaatttgggttgggatgataccatcattctgtcacttctaaattcattctgttaacaatttttagagtcacatgggtagaagctttgattctgaaaaactatgcacttttaagttttgactccagaaggtaatttcaactcagctgtaaacaattcgagagggtgaatatgaaagaggaactgcctcaccaggcttcccccaccctggcgtctggagtcctccctgccttcgtggcacctgatttcagagataaagaatttcaaggatatgctagagcagggaggatgtaaaagggaaagacaactgcagttagctcaaaaccagactgtgtgaaacagccctgctgctttgtcctttctcccatcccccactcactcactgatgccttccatcacccggagattacagggaaggctggttattgacagctgggcagtttgcacaataaagtttaacggtttacatctctttgtacaactttgtcaatgttttccatggatcaccttctcaggtgagcccactgactcctctccttcttctctttcccttcaagcgtgcaaacgcaaagagcaagaaccaaacaaagacaggaacaattcccagaagaagtcccgcctggtgttcactgacctccaacgccgaacactcttcgccatcttcaaggagaacaaacgcccgtcaaaggagatgcagatcaccatttcccagcagctgggcctggagctcacaaccgtcagcaacttcttcatgaacgcccggcgccgcagcctggagaagtggcaagacgatctgagcacagggggctcctcgtccacctccagcacgtgtaccaaagcatgatggaaggactctcacttgggcacaagtcacctccaaatgaggacaacagataccaaaagaaaacaaaggaaaaagacaccggattcctagctggggcccttcactggtgatttgaaagcacaattctcttgcaaagaaacttatattctagctgtaatcataggccaggtgttcttcttttgtttttaatggctatggagtccaagtgcaagctgaaaaattaatctcttagaaccagacactgttctctgagcatgctaagcatcccagaaacccaaatggggccttcctggagcgagttaattccagtatggtgtcaaccaagctcgggattgcttaaaatatcatccatcccacttcaggtcctgtcagcttcttgcagtcagagttcctatgagtaacaataggagtttggcctatgtaaggactctgagtttaggcttccaagatacaacaataagagaagaatctagcaacgagaatgacctcatttgctttccacatgcttagcctcattataccatgttatgtccaagttcacagccacaacatcagaatggtaattactgagcacaagttttaaatatggacgttaaaaaaaaaaatccaaggacctgtttttccaacccagacatcttttcattgaatgatttagaaagctttaagttgatccagcttacaattttttttttctttacctcctggaaatctcatatggtcttggatccgtcaaaaaaaccagtcagttcacttgcgctcaaagtatcaagcacaacaaagataaacagaagtgaggaaggttctgggttcactacatctggattttcaagacacctattgtgaagtcattagggaattgatgagaatatggcttcaagcacattttgcagtttgctacaaattctgttgtacataatgcagacgcacactcaggaggccaatttaactgttaacagtgcatggagcgaatgcagcattttaaaagatctaggtttttttaggtcattaatgtgtccttggttgatcagtcatctggtccctcctactgtgtgttatgaccaccacgtaatccattctcgctctttctgatttggggtttttcctcatccatcccattagtagggatgttttctgtgttttctagcaagaaaaaaaaatcaatcaatcaaacctgcatacatgttactcatgactgtcatctagtcctaaatctcttctgttgttgaatcatccttgcaaaacagctgaatacatctggagaaaacacagcacaccaaagaagcagaatactgcaaaccaaagacatttatgacttgtcattttctagcctaaaaatactgtgattacttttagaaatcagaaaacctctgcaactccgaatggcattcagctcttgcatttggcgcatcatcgggctgagcggaccagctacaccaaggacattagccaagccacccagaggggtggctttgccacaccagttgtcaccttcccatagcaagtggaagagcgcccacagaactctgggagattgcaaaggtcacaatgtgcatatttaccagtgaatggccccgggtggggccacgtgggggtgttcaaagcaagccaaacgctgcaatcattctttacagacacttgagactgacttttttatgaattacttagtcgaaaccaaagaaactttttctgcacctacttctgcaacaaacaaaactgtcccattaaaatgaataaataaatccgtaaatcaatggaaatcaccaccaataagaaggaagcacgccagaaaataaacgaaaacaaaaacagggagacacactgtgttcaaacagacctcttgggacattttttggaagcagattttaaagaaagggttgagacaaagatagaaataaggaagagcctcagtggctgctgcttcatttgacaactcacacggtaatcttaaagctgaagattgtctttaatttgtgcctatgcagtttttcaaaagaacacggaacagagcaacagaaacctcaacagctacaataccaaagatgaggatttctcacaccttttgtttcagttcattatctcctcttgcctggctaaaatactaatagcgccattgaactgtataaaggtaatcaattatgtttctctgagcaacaaaaggaaagggccatttatttgattttattgtttcatttcaattttgtcttatggttttttgccccaacatggaatctctcaaaagtttccatggactccaagtttaagatgttgggatattgaacagttctctctgctcagcagagggtagggaataacattatcacttgaatgttctttgcttaacccttagacttggttccttctatgttcagagtctcatcatcaggggaaggaaagggagtgagggtcagggataggggtcttggtgatgcatcctctcccgagccacagaaccaaagagtttatagaggaatttacagcctcgttttcatgtgattgctacatcctaacagggcttcatttgggggtggggggaaacatgtaaaaataattgccagtttctacttttctattagctttttaaaaatcagctgtaaagttgcatttctaaagaaagatatatataatatataaaatacatatatagatcaacttgacattggtgataaccaaaattattgctgtccaaattcatgtcttgttttggtccagtgcttcatttgctaagtattcggttcagaatttttctcatttctcatgccattccagagttaatttgccactgtggatgatttgaagtattcagatctctatggaagtttctgggacaggtttaaagtcaagatcaagcattttagcatttaacctgttgataaatggatccatggtgtacatgagttttatttgtattcggagtcatctctattctatccctcagcctcgattaaggtggtgagtgaagtgcatccaacagactcggcccagaactgggtcctgacagtggggtgctcatcttctgtaactgttgggaaggctcggtggtccattttcaccagttaaagaatatgaggccagcccagaaatctgttctccaggagctgccctgtcccatctgggtgtgccagaccccctcagtgagcaggtccaccaaagggacttctcacaggggaagcccaactcctgttgcaatgggttgatagatttcctcagggtggtaattaccaattcgtattttgacaagcctatgtgcaaccacagctggcactggggtgggcagtggtgttgggtgggatgggggagagtgtctcaatcctgaagagaaaatataaagcaggttttggggagacttctggagtcctgcccctagagagccccattgttgttctttgtgccccctcctcattccccctatgtgggtctccctatgcaggagctgtgagagaatgtgactctccacaatttttataattcatccttcctaggagattgttcattggctcttcccttgtgtccctttgtcccttgctcatactccatgtttcctttgtcaaaggactaagaaaagagcatatttcagcagaggagtgttcccatgtgggttgatttcaacttgggtatttctaaaagagtccttgtgacatgtgtccagtggaaatggttgctcttttccagactggattgaggaatggagcctgtttgatttggttagtgattctttgacatactaatctcagcgtttgggtctccagcatcctctgaagatgtctagactagtagaggctgcctttgtgacctgacattacaacattggtcaaaccagtcctctgataatcagaagaacatgtcataattgtttaaaaaaaaaaaaaaggcaagaatttctctccaaggagctttaataaatgtctcattccagataatgtcataccagagaaaagtgcttgcttttagaaaattatttacatacatatataaatatatatgtgtatctatacagttatgtatcaaaattttaagccctgcagaatttcaatttgttagaaatctaacagaaaaaaatttctatattgaaaggtaatagaatttaacccagtgagtttactcaaggatttttaaatttaagttaataatttcagagaaaataaccatttgggtgtggttatagtttagtatccattacctcaatccaaggaaaattccaggcattcctcaaccatcaggaaaaggtacagtgtgaaggaacagttctcagccaaatttcacattcttgaggcaacagaaatcaaaacactcagagccattgagtggaaaaacaatttactttattcctttacacaaataggcttgcattgtttttgttttaatgtgattttggtactagggatataattatttcattccaggaaataataaaaaaaaacagacagagccaatacatttctttttttaaaggaaacagcaacaacaataaaaactcagcaccaatatttaaaagcttttccaaaatgtaaaagaagtgtttagcttgcaccatgcataaaggtgcaggctagttgaaccaggaagcatggcacttcctctggagaaatccagaaagagttgcttctaagctcccttttccccctgcaggctcttggcaattgtaggctttagcaaatccagaataattttcaattcaagctaaaataaaatcaacatttggaatgtaaatctgatacacacacacttttctaagtcaaacaacatatttcaaaaccaaaaataaataccttttagataatcagttattttctttgtctatactgggcacccacctactagtgccagtaaattcaagttgaacagatttttaaaatcactattatctgggtatgggggaaacttccccacttttgaaaatgttggtagaattataggaatgtctgtttgattatcattaccaaagtgtcatgacagtatgcctttgtagtgaactcggattttcaggagtttgaatagttggatattttaaaatctaagaagaaaaggcctgtttccaatgttgttgaagaataatgaactctattaaaaagtggagaaaaagataatacatgtggtcaaggttgaccacaaggcccaggcacaactaccttggcgataatcttctagattcgtaacaggttagagctgactttttgtttttgttgttgctgatgctgtgtgattcagacttctcagcctaaccaggaagagtaagtggaaatggtagatgaagaaggggtagagctggtgtatctataactttctgatatttgtctgccaaacttgatatattagtaatttttttatctttagctaagatcaagtcacccctgaaacaacaggagattctagttttaaaataaggccacaaaaatccttacggaatgaagaatggcaccccagttggttgtataagtctcataagataatgatgttgattttaaatatggatgtctcaatgcctgttttctatcaatgatttgtttgtttccaaggtcggggagggaaagaggggagggtttatctgttttagaaagtctcagaatacttataaaatacagaagtagttattaaaatatataggacctcacataggtagatacagaacttaccattgaggctgatgggctgttgtgtgaatcacacaggaccttaaatgaggctcattattctcacacaccaaaatgactctgacagcctgaagcagttattgctagagcccaagctttccttggaggttttggagttaggttgattggaagtaaccagctaataccttttctagtggagaaaaagacattgctaccagcttgttcatcccatagaagtcttccactctgctccatttttagcagcaagcatttcatgtagcataaaccttggcagataagtgtgcctaaggtttatacagtctgtccgcttggatgtatacaaatttagatacatattttaacatgtgttctcatagatgactttataacaacacacattacctataggtgtctagactgtgtacatacaagtgtgtacagacaagcttcatacgtatatactgtaatccgttacaacaaataaattttaaatcatcgtttaacatgtatgtggtacttctacagtgtacattgttttcattatttattgtaacattgaaaaccacagtgcagggaaaacaaaagtatcccagcatcttcatcctgtacacttggaattaatttcatttgggcatatccaagataaactcaactttcaagaaatcttgtatattatttaatcatctgtgttaggatgacacctatgattgatgacttcggttgaatagctttattctggatttttcataactaaagctaaatccaaagacctgaaaaaggacaaaaagaaaaaaaaaaaaagaaaaaacaaagaaaaagaagaaaaaataataaagtcaagcgcaaactgatggggagacagtgggctctggtttccaggattgagacaatggtactgcggtcttggggagactgcgttagctagtggggagtggtgatttttttcatgcttgtcacatctaaatggtctttaacatgagaaagttttagaggttataatttcctgctttgtttttatttagactatcaaatgaagttatacatgttgtcagtcaaaaaatgaagacaccctctgccccaccccacagaatgctttttatcttgtctctttgggttatgacccaacaagctaagtaccattaatgtaattaacttatttaaattagttcctagtacataaatgtataggatttgggtaattatttaatcatccttccttagtttgattctactccttgtacttatttatcaaaacctagaccaatggtgcatcagagatgcaaaattctacttggaatactcttgaagtttagtttgctttataaagcagtgaaattctgttacagacagggaagaaatacaggttacaaaaagagaatttgggatattcttccctcttaaattaacttttaaaatagtctaagtaacaatttttaaattatttaacttaagttcgcagccccacctggtaccaggcgaacttcacctcttaattattgtggccctcggagccttcatattgtaacttatttatttaacttattcagcatctgtgaaaggtgcactgtatagtttatatttttaatttaaaacaacagagagcactgcagtttgtttgctgtcagaacaacagagcaaattttgtggacaagcaatgactattcagcctgaacctgtgcattcagaaaacataagctgagaccctgcttcaccagcctggatttcggggcttctatacagaaactggaaaaataaattttaaaaaaatcgtaaacaaaaagagagaaacccttacactagctgcttccaagaatgaactctgtgtgtatgtaaagcaacaaaacaaaaaaggaaaaaaacaaaaagcagaaaaaagaaaaaaaaaatgaaaaactttctatttctagtgagaaccaaagaaggctacctcactgactttttccatttgtaattttaatcgtgttgatgacaccaaagataccaaagatttctttctctgtgcggtctgcattttgcttgtgctcttttataatttgaacgattttctctgacatatggtatgtacagccacagctcagataccccaaagaaataattatctatgcgacggcggctgctaatttggaaagggatattttctgtgtttctcttatatgtttgctgtctgctcgacatgttcaagatgcgagttcagatgctgctgtaattggattccttaaattctgattacaaattgaggaaggaaactggttggaaatggccttcagtcctagccatggcctctatccccgctgggacctgtcacagtaaagactgccaattactgaaccacagaagctctgaccattgagtagttgagctggaagagaccttaggaatcatttagtccaagccccggtggcccagaggaatgaaatagttatccaaatcaaataactcttgagagtgaaagcccacacatgcctcctggttcctgccccagtgctccgcttattgtacagtgctacctctgcatgagagcggtcccacattgacaaataggatggtggcaatcctttagcaatgagcagggactggggtttatctcttaacattttcagctgtaaaattagtcacaagcattttcagtgtcccattagtacatagtcacatatggtcggttgcttcgtgaaggtggcctgtcttgaaatactagggctcatacgggatttttgccctaggaaaaacatgttgatcccaatgatgtgatcacttttgaacctttccattacaaagcattgtatagataactttttaattcagtaggaggagaaagttcattcttggcctgttggctttgattattatgggtactttaaagtcagtatttatcaagaaagggaacttgaccaccattggcacatgtgacatttaagctcttcagccttttcctttttagttgtaggtgtttacatttcatttctaagccaactctgtatttatgagagaagtttaagccttacatcatttgatactaaagggttatttgtggtaaatgaaaaatgaccccaaaattacagaggaatatgccagtttaagaaatggctacttaaagttgcttctctctttccttcttactcatgaaattaattggtcttcttcaagtttctttagattccattaaatgattaaatcactattaagagccattcatcaacgtgatttgtgtgttagccaatgaatctgtctcagcttttgaccaaatgggttttagacaaatgcaaagatctgcctctagtccatatggctctttttgagtgctagtattttgcatttcacataatgtagttattttgagcttttaaagagagcatttagacaaagaagcaaagagaggaagggaccaatcaactcatcagttccatgcatcaacaaagcatagctagtagaggaatataaatgacagattgacaaactgtaggaaacactgttactctctttctgaagttttcaagcaccatcctatgtgaaagttccctcctgtccaaacaagctcaaggcccatcttctccctatacaaggcaaacctgtaaggccttccttccaaagagtacattgctttggttttcttcctaaattcctattggaattagaactctcagaatccctgggagacagagcaaagatgacttaattcattgagcagcagagctccctataagtgaacatcaccttccccatctttcctactgccacacccatacgagagaggatctagaaagagcgatggcagcctgaacacagaaaacatccccacttggcagacctctcctcagcaatccccccagcctcatgcttcacttgcaaagtgtgacataaccacgggacgagtgccttgcttgaaccaaagcaacgatttagccagtctggacctctctgtgctttttttaattcttcctgtgaatacctcagcttcaactgggcctccatacagtcagttggtgggcttattgtactgtggtgctttgcaatgcaaccctgcaaagaacaagatttgtactaataccaaaggttctttctctatgtctcctcctctgcctccctcgttcttcccttttttctagttcttcacggttccaaagctttactatgaacctgggcatgttggcaatgcagaccgcgcaattccttaccgaattttctcagatatacctcatagacaatagtgtttagagtaatgttattatagcgtatgtaataaattattcactgtttcttttggtaactgtgatttaaaaaaagaaaaaagaaaaaaaagctttatacgttttaggttgtgcttttgtaatagatgaaaaaaggtgcgcttaaaaagaaaatgtatgtttttttccccctttggattttatttatgctggattggggaaagttgcagaatgagcccaaagtttacagtttcatattttgctgaagaaacaatctgtgttcatttgctctgttgaaaagaataattattttctacatttgtgccacttggtctgaacaattaattgttccgtgttaacagtgtagtattatgattagcaactgccaatcagtgctataattttatgcatgaggctaaaaatttagcagtgtgatgcattgtggtcttaatagcaacatttttcattttgaactagatcttcccctttggttcaatggactttatttatgcatgggcgcctattgtttgttagcagttgtggaacagttgtgtatacattaaactgtgaaaatgtacacagttcagcctcagacggtggtaatattggttttattgggagatgtgtcacctcgaaaataccctttacatctgttgggatctgaaaatgagtcacattgaattgggttccagctttataatgagaaacgttattcctaatttttgagttagccaatttgcattccacaaattgggatcctcataacccaaatatatcaccgtatgtgagagggatttgaaagcgagtattgaaaaactcacctttgcatatttaatttccaccaaaaggagttattttggctttatgctcatgaacttagacctaactggccatgtatatgtagatgcaaattcatctagctgtggccctctttgatctctgcttgggaatggctatttttgactatgcgtggtttcttctcgtattttgtgatcaggtcagctcccagtagaaactcaaatggcatcaatattactaactcttctctgcccacttctcttttgtccactctcctagacattcccaccaactgttccagtgatttgggcaaaaatacgcagccatttcccaaaacttcacatgtgcagctatcatggctgtccctccctagacttggaggtgactctcacttaatttttacctgcccaacaatgttccatctaccatctaaaaggtaatataagaagaagttttgaaacccactttaggaaaaccatcttctttaaatccttcaattatctgaggcctctatatgtcaaaactatttttcagttgcaggggattgggcaaacttgttctttcttatacttgggttcaaagacccattctccagtttcatatttcccaaaccaaaatgcttgacataaagccaaatcaactgccaagcacactttattttgcataggagtatgcagcctagggaaccttggttgaaaagcagcagtctgctatgcaaaatattggaaatcactgacagtgtagcattcatattatctgtcaatgagggtatattgggaacgtgctctcgtgaataataaaaagcaacatatttttatttggccttataaattaggttgtggtaatgtaaactttgatatatagtctttttatttttctcttattaatctgccaaagatgggaacagatacaagaatttttcaaattggcttttgtaagacaattgatgattgtaatagtgtttaatcttccagaaagctttatatgttgttccacaataaaattgatatttgtttcagcaaagttttcctgacactcacaaacccacaaactgttcctcttaatgcagatattgtagaatctacaaagttcaaatccatttttgatccaaagaaagtagaggagtatttgagacatgagtgtacccagccctttttttaatcacaggcaatgcatgggtctggctggttacactttgccaagaagacttgtcttatgaaacccaaggtatattttgttatgccattttatgtccttttcttttaacattgtggaaagtggtatgttgaatcaagtgtaagctgagttttccagacaactgaagtagctacatcatgaatgttattttgttattaaagggtttttactcagtgctttgtgccaatggatgtccttttccttggagacacataactacaaaattacctcagcttggcctggttttctctcctgccctcttggggaaacatgggcctggcctgggaaaaggcaggtcatgggctggaaggtaggttttggtactaggaagaaatctctgtatctgtcagctttaaagagaactgggccaaaaatctctaacctcactctctctggactccaacacttccctgcaatcctttggtcttgagcatgtgccagcatgaaggcagactccagttcatacatgaaaggcaagaaaaagaaaatagtaaccttgaatcttctgtgggccaccaggcactcacctttccccaccttgcacactatccagtcaaggctattgcagcccatctggtggctttacatgggacattaccaaaggcttcttcctccatcctggggttgcaaaggatccaggtcccctccatccagtggggctcttccacatcagaagtccccctcccaccatcctctgcatcctgtttagctatcccatctataccttttggagatgattatttagaaaacaaagaaaggtatggaatggggtttcctattgtttgctaggttatattttagcaattctcaattctttgatctggaaaaatacaagagggaaaaggagaccccactatctccctgtgctttgctcccatctcagggggcaggggcagtgcacattgcctatgctgttgatctgtcttgggcgacaggctgaatcacagctattgccccagccaaaaacatggcccatcaatgcctactttatctctgcttgaaaatcctattcaaaaagttgtagagtttgaggtttttatccccccatatcctttgctttggtccagtttggcctttagcataagagtcagctttatctctaggaaagttttttcagattatgacaaggaacctgccacctgggaagaaaagagtccgaagactagcaatcggataggtagtcataccattaacagatacttccttgaaggtagaatattatttcctttctttacagttttgtgttacacaagtccaagtggtgccagcaaacttcttaccgtgaaatgttgtaaaacacctggcatactgaaatttctgaaacaaaaacacaagctccacattgataacttgataaataaccactaaagtttagatgcagggactgagatgatacaggcaaaatcttggtgttggtttctcttttaattcgtatcttcgatcacctaacctttctcaatccaagagcagttcagtcttttctccccaagtctaggatgccaaagagcatcataggaaaagataattagggattgaccagcatttcaattagttctcttcttcatctttgcatttctcaaaagtgttctcctggaccagagggaaagagctggtccattttttttcattctttctattcaaatttttccacccagacaatactttattaacacagatactgtagatccttccttggtcagtgaattattacaagaggagctatccttccaccaaagtgagtgaaaacaagttccagtatcttttcttccatccagttttgttctcagaatccaagtcagtcctgggtcttttctcactttagaccctggcctcagatgtgtttattcttgctatttaaaaatacctttaaatttcacatgctggcctgcagaacttgcatcctttgttctatactgttgactgcttgatggtattgaaaggtgactataatgagggaagaaaggaggaggtaaagagagaagaatttgtcccagatctgtttaaagtttcaaaatttaaaaagggacccattaaattatgggaaaatggctatagagtgtgagcctccgttgaccatatgctcaaagaccgtactctgccacctgccttccaggtagctattctagaaactcagtcctttgtggaaacccaactaccttttaaaagtctctttccagattccaaaaggacaagagatcagagagtcacatatacgcctcttgttttattttcttgctttcacgggtattattgccaagaaaatcgtagggaaaaactttaaacttttcttttcagttgatccctttgacatcacctctcatgtttaaaatcaggaaaacacacccctaaaatttgcactctcttccgttttgaaaaagaaaacccacacacaaatgcacactattaccgtctttcaccctgcgctatatttccaaagtgtattataatccagatattgccccatctcaaacatgttaagtcagactgtgctgaaagactttccagggacggtcaacagggtatatgttcagtggctgccctgaaatcctggtggggatgaggatcacgcttcatcatcaaggggatgcccatcccctgataagctcccagtccttttggaagatttctttgaatgttaattgcattttcagttttgctcatttcccaccccaatgttttgtctgcaacatcgcttacactggattctttctatttttattcctatcattaaatggtagtgctgtaaattctgcaattaatgttaaataaactgctttaattcattgaccatggctcagttgccttctttttcttttcatggaaggaattaagcactcttccccctacagcaccccattgtggtttcataaaaaaacagtaaatttgttcttagtgagactacaatttctatctctgacagtatgcaagacacatcttataatcaacaaacctgttatccttgttataaatcacaaaagatgagagatgctccataaaaactaccttttttcttaacctgttaacactttagagatagcctgtcctagacttatctttgcacagattttgtatgaggtcacatatggtgagtcaaaagaaggatcatgttattgtcaccctatggaagaatcaagaaaaatagaccaaaaaaaataaggcctcatatgaaatctaaaccctgcaacaaattagttgtatggctttgagcaagtcatttaaatcatctgggcttcagtttctccacctgtacaaggtcaaggttaaacctggttttatcaaaagtcccttccatctttgcatttgccccagatttttgaaaatactaacatttttatacagattttatcttggcttattattttctctaagttaatgagctaatgagtttgtttattcgttttattttattttattattttattttattttctgagatggagtctcactctgtcacccaggctggagtgcagtggcacaatggctcactacaacctctgcctcctgggttcaagcaatcctcccaccacctccgtctccaagtagctagaattacaggcatgcacccagcttaattttttttttttttaattttagtacaaacggagtttcaccatgttggccaggctggtctctaactcctgacctcaagtgatctgcccacctcggcctcctaaagtgctgggattacaggcatgagccacctcacccagcccatctattcattttaaatttagatatctgagattggagactattattctaagtgatgtacctcaggaatggaaaaccaaatatcgtatgttctcactgataggtgggagctaagctacgaggatgcaaaggcataagaatgatacaatagactttggggacttggggggaagagtgggaggggggcaagggataaaagactacgaatatggtgcagtgtatgctcctcaggtgatgggtgcaccaaaatctcccaaatcaccactaaagaacttactcatgtaaccaaataccacctgtaccccaataacttatgggaaaaaaatttagatatccacaagcttcaaaggagtcccattgggttaacccttggtctaactcacctatagcccaggccatgaagcactgattgccttcatctagactggtggttttcaaccctgggtgcacatgagaatcacccagagagcttttaaaatatactgtacctaaagtccatcccagaccaattcatccaattccacaagtgtgggcctcaaacattggtgtagccattagcttttgctagagttagtttgttagtgggaacaaaccaccctaaaacatagtggcttaaaaagcaactatttttaactcataattctgttggttgtcaatttgggttggtctcagctggttagttcttctgattgggctgggctcactcatgcatctgtagtcagctccccagttggctgggggctggccagtctaggatggccttagtttaatcaactgagctctgctctcctttatcatccagcagactggcctgggtagggttccaagagatcaagtgaatcacacaaggccccttaagaccaaagcatggaactggtatgatcacttctgctgcatcctcctcactgaaggacaccataggtccagcctcacaggggtaggagtgaaaagagattccacttgttgatgggaaaagctgaaaaagcacattaccaactgagaagtgaaagacagactgtagccattttttacaatctaccacaatctatatttttaaaagctctcccagagattctaatgtgcagccaaatttgcaaagcattatttcaaagcctagtgtttttctatttttttctcacaattcaacacttatctgtgttaactccctcaaatgcctttatcgtgttgcttgaactcattgtatgaaaaaacaattcacaaccttcaaacttgtagagtaggtatcattacaggctgaatttatacagatgaaaaagtcttccacaaaccagagggatttagacactggttttattggcaggtgaactcgcagcctcagctgctggtggctgcaaccactcactaagccatcccatgtccagggctggtgggaagccctgggaaggcaggagccacacatggagttctttctgttggaggaatcttgggctgtctcaggcacatgctgagaatattactgggcctaggcaccgccttggggtccatcatggagatcttgactacaaagcagcatggcctctggttctaggatgaaatccctgttatcataatgtgcttttgcaccattcttcctcgaatgtcgtgtccttatttattcgcagacctttggacagaaaggagcatcttaagagaacagttgcataaatagtctcagcttatgccaatgctaaactagataatcaccaaaacctcttccacctctgctatttcctgtttctaatgatccatcactcttactcagagaaggaaacagtagctaaacctggcaaatttcaatgctaagaatctctggtctcagtttagccacatcaggatagccaaactaagagaaatgtaaaagtctaggtggggcctttgaatgagagattaggctcattgaaggaaaatacttccacactttgggagctcattggcatgagcccatttttttagcctctggttaagggcatttgatggtatgaagtatcctttagtcaaaatgctttaagttattggtaactgcccttgcaaatctattctctcacttttgtcttctccctggattcttccctccttaagtggggctagaaggggggaaatcacttgcaaaaataaaattaaaaggaagaataaatccatgtggacccattaagcatgaggaagcattgctcagtccacagtggctcactgagcacaattatttctagaattaatgatggtggttgccaaacttagaggcagccactatgctgtcacctccagaatcctccttccttgatctgcacaacaatcatttaggggacataggtagggcagggtgcaacaacctcaggaccaagaggcagaattagcattcaaactcagatgtcagagttgaccccgtgcagctggtcactcggtgctgcaccatggagacctggaagttagtagggcatgcttcctcgggttgcagtgatagagcatatattaccaagtcattcctgctatggagccatatcagctgtattccaaataagtcacacagacaaaaaaaatgccaggagttcagaagaaatggggatcatgccaaacggggctagttcaaaaagggctctctcatttcataagatttccaagtactacagttttattactaaatctaattgagcataactcaatgcatggccaagtgatctcggtttgtgggagtagattacatttctgcccccacgtagctgctcccaggtaactaacctaactaccccaggtagtattttcctcagattatcaatatgtaaatgtctggctcatgcctccagtagtacttctagctctgatttgagagagaaaccagcggtttgagtcagaagatgttaattcatgtcctaggcctacctcttactgatatgtggctctgggaaagtcatttaaattcccatctataaattggggataagaatataaattgtatcactgtcctgcctggttcacaaagttgtgtgtatatatgaatatatcgctattaaagacaaccaacattttataaaagagaaatctgaggctcagggaggttaggatacttggccgaggtaacacagtagtggagccagaatttgagcccaggatcgtcagcttcaaagcccacctgaaagtgtcaactaacatgaattcccctagtgacaggagagagctgcatcatggcactgtagcgaagcatgccacaagacgtaaactatttcttaacaattagctttgacaatggaagtgcaactagtagaagaatttataaacttcctcagaaataatgccgcatatctacaactatctgatctgtgacaaacctgagaaaaacaagcaatggggaaaggattccctgtttaacaaaatggtgctgggaaaactggctagccatatgtagaaagctgaaactggatcccttccttacaccttatacaaaaatcaattcaaggtggattaaagacttaaacgttagacctaaaaccataaaaaccctagaagaaaacctaggcattaccatttaggacataggcatgggcaaggacttcatgtctaaaacaccaaaagcaatggcaaccaaagccaaaattgacaaatgggatctaattaaactaaagaccttctgcacagcaaaagaaactaccatcagagtgaacaggcaacctacaaaatgggagaaaattttcgcaacctactcatctgacaaagggctaatatccagaatctacaatgaactcaaacaaatttacaagaaaaaaacaaccccatcaaaaagtgggcaaaggacatgaacagacacttctcaaaagaagacatttatgcagccaaaaaacacatgaaaaaatgctcaccatcactggccatcagagaaatgcaaatcaaaaccacaatgagataccatctcacaccagttagaatggcaatcattaaaaagtcaggaaacaacaggtgctggagaggatgtggagaaataggaacacttttgcactgttggtgggactgtaaactagttcaaccattgtggaagtcaatgtggcgattcctcagggatctagaactagaaataccatttgacccagccatcccattactgggtatatacccaaaggactataaatcatgctgctataaagacacatgcacacgtatgtttattgcggcattattcacaatagcaaagacttggaaccaacccaaatgttcaacaatgatagactggattaagaaaatgtggcacatatacaccatggaatactatgcagccataaaaaatgatgagttcacgtcctttgtagggacatggatgaaattggaaatcatcattctcagtaaactatcgcaagaacaaaaaaccaaacaccgcatattcttactcataggtgggaattgaacaatgagaacacatggacacaggaaggggaacatcacactctggggactgttgtggggtggggggaggggggagggatagcactgggatatatacctaatgctagatgatgagttagtgggtgcagcgcaccagcatggcacatgtatacatatgtaactaacctgcacattgtgcacatgtaccctaaaacttaaagtataataataataaattttttaaaaaaagaatttataaacttgcttgttttgccctgaaatgactattcataaaaattgccgtgagctgactaagccaatttggttatgcacaacatttaggttcttgtggtagctaatggtagccacccaaaggttttgagatgggcaagagtcaactacttccccacaacttcttgccagattttaaagaaagtgagtctgaaaccaaatgttgccacatataggtatttacttaacatgttttatttagaaaatcaggcacagaaccacacataccactcacggtgggagttctgtgaagtgtgagatctctgtattattgggagtcctaaccatactccagatagacctaggaacattttggaggcaggctttcattagtccttgggcagcatcagacgacaggtaatattctagactgaggactgaacacaggaacttttagggatcaaacctctcctctattccctaaagcaggctaaaggtttcactgaagtcttatactctgtccatgcaagagaacagagttagggcttccccaacccacctatctcaaatacctttaattttaccagtcaccagaatccatttataacattttccatgatacagtgataggcgactgtcttgtagtagactgagatgtggatggctgaagcactgttagtgaccagtctgcagtgagaacactctgaaataatgttcaccaactccctgttcttggttaggatgatttactgcctccatattgaaccttgaacaaacagacacatgagtaacaccaagctgtctgtgccaaagtttattaaaataagtcacagtcattgcaacaaagaagaaacatagtcccatcctgttgaagaccatatgttaatttcaatataatgacactttatgtgtgcatttattcatctcattttttcctgcagcctatactgcaggtattattattattattcccattgaataattaaatggtaaaagtttaaatcatcttccactgcctcatgtaataaggacagcttacatgtgtagatatttactctgtgctaggtattgtgctaaacttttcacgatttatctcatcttgttctatcttgtgaggcaagtactgtaattatccccacaatacatatgaaggaactgctctttagagaaataaagtaacttgcttcaggtcacacactagacaggctgactccaagcctaagctattattagcgtcgagttttccttcagccaatggcagagcttatcctcgtattcactgcttaggactctgactcatgtgttctttcaacagaattctgattgctaagcagctgagatgggtagaagtgaaggtaactagtgctaacgccctcccagcatctccaatataaatgcattcacagccgtgatgctgtggtttatggctgctcagaacttgctcacatttccaagtcttcatttcacccttggagaactccattcaggacatgtatgtagaactccatggagcttacaaccaatgatttgggatgtcccaaaccacacagaagcatacagaagtgcaggtgagatatcactgtgggctgtgcatattcacaggattgcaagagctgccacattgaaaccagatagaaagagcctggtattggcgtgaactagtggctacaaatacatctcctaactggggcactttgggtaacctcacttgagctttaaatggtctcaaaaatcatcattgccattgttgtcatcatcatcttcaccttcaccaccctggctgaatttttaggagaccagtaaataacactcctgctttctctttctgagtttagatcgaatagaaataagacacaaaaatgagagtctttttaaaaatcagctttattggtaaagctgattccccccaagctgagcttccccgcctaaatctgcagtccaattctttcttcacccgtcacagggaggcgggaaggagttactccaaagagcacttccaataaacctccacatgtaaattttggcttctcagagtctgtttcccagggaacctaacctaagacacccatttacatgcctccctttactccacctcttcccagaactggcctattctacaattagagaccttcctttcctaaggaaaaatgtgcaaaataaaatatcaacgttctctaagatctgctgtgagaaggtcaaatcagaacaatggacagcctccaaaaccatcctccttcccatgcttaatgactgcccactgctcctcagctgcctccctctggctgggcctcttcctgctcagcattctagagcagccccgcaggctctcctctacccacagggaagagcagaacaggagacaggaggtccttgttccttgatgggctgaagaaggatgttcatggtccactgtaccaatgaggcaactagtatcccttcagagaagcagttgcaccttccaaacccaatctggccatctagctactcaggattgagctatgctcaggcatttcttccagggacagctttcaaaaaccacaagtctaagaacaaagaatgagtttgtacctcctgcacgcaccatggaaaaccttacacacagagagaatggacagtagcctttatggaatatgagataaaagtgctacctgctctgacattgtgtctaaaaccccaccaacacagagtactggggggagggggcattgtcctctttgggtattcacttttgtttatctttcctttaaagtacatctcttacatttatatatatatatatgcaacattttttgttgtcacagctgaagaagtgttgctggcatctaaagggtagaggccagggatgctactaaatatcctgtaatgcacaggatggccacccgctacaaaggttctccacccccgagtgtcagtagtccaagaatgagacactctgctccatacccatttccttctctcatagcaatgttatcatttcttttgtatgtgttcacataaaatctgcattgtagggtgcatgcattttcaatttatgtaactagtattatattagattatctcacgctaccttatggtttatactgtttttgaggtctgtttatattactgtgtgcactctaatgcattgcttctgggttctacatagaaatccacagaatgcatcaccacattgttcccatccatcacctccagaaagggatccccaggttgcctcctagtctctaccatcataaactttgctacagagaacatccttgtgcatgttccagtatggccctgcatgagaacatctgtggggtaaataccaggagtggaattgctggatatcaggtagatgtattgtaaacttgaccagatattgacagacatctctccagaaagactctcccagtccatactgaaaccagcaggccatgacgctttgtaggtccctcatttaaaaggtactcttcttgaaaatgcacataacctatattaagattagcatattaaatcattattaccttccagatgaatccatcagaccatcttcctcacaggaagtagcttcagtggcctgggtgcctaggctagaaaggcttcaggtaggggttataagtagaaagaaaagtgggaggacccaaagacagaccctcttctgccctccgggaaaattttcttccctcctgaattcgctgccatccgttttaatggattgtttgtgtcttccattattaaactttctttttaacttttataacttcaacttgaagggtgttttctttttccataagcagtctcagcctaaatcaaggggaacaacctagagaaacagaagcacgcagggttcagacttctgagaggcattcatgctcatcgcggcaccgctcctgcttcctcagtcattcagctcgcccacgggatcaataaagcgatcaataaagcgatagaaccacaaataacacaggcctatcagcaatatattagcaaagagtgtttaaaagcaacttttaaagaagattcaataacattcgactccaaagttggccaactccaatgtcctgaagctcaagttcattcctaccgagttagcaaatgatggacaacgagcctgactgtcagacagatgggcctggactgctgggaaggccatctggggatgccagaggggttggaccgacaacagggagccccctgggagggtcttatgctcttgatggcagtgcttttgagggccaaatgtcctcagaggtgggtcaggacaaaatcttctctagaataaacagctccttcaggtaacaaaagggattttgcaaaaccccattactttctaatacttttttttttgagacatagtgtcactctgtcgtccaggctgcagtgcagtggcacgatctcagctcactgcaacctccaccttctgggttcaagtagttcccctgactcagccttccaaatagcttggactatagacatgtgccaagacgccagctaatttttgtattattagtagagatggggtttcaccatgttggccaggatggtctcgaactcctgacctcaagtgattcacctgcttcagcctcccaaagtgctgggatttcagggtgtgagccatcgcgcccagcgtctaatacatttttcacctcagaacaaggagtagctactaggaaatccctttttatccactctcatgggtcattaggcaactgagctgagccctggggttcccaatgagcaccacccccctgggagtttcaggccagagacagaacacctgctctctatgaggtattggacttgatgttcaatcaggcaaaaggtaatatatataaactactacaactgggcctcacacacagtgtgagctctacaagtgattgctattcttattgttgatcatcataattgtcatcatgattattagattctgaggattcaaatgtacgtaagacaaagtcctttctttcagggagtttgtaggtaagtagtgcagagacatataagaaaccattaaaaaaataagcatgtagaataataattgaaagttacaataagggcagtggaagaaacaaaggcctggaagagagaattgggatgattcagggaattgtaaatgggattaagctgtaaaaaagaggaaatgctgctgggcacagtggctcatgcctgtaatcccagcactttaagctgccaaggcaggaggatcgcttgaacccaggagttcaaggttacagagtgagatcctgtaagcaaagcaaagcaaagaaaagaaaaaagaaaagaagcaaagaaaaggaaatggaaaaggagaggaggaaaggagacggggagggaaggggaaaagctgggtcccgtggcttacacctgtaatctcaacactttgggaggccaaggcaagcagatcacttaagccaaggaactccagactagcctaggcagcatagtgagaccccatctctataaataatataaaaattgtctgggcatgatggcacatgcctgtagtccaagctactcgggagggtgaggtgggaggattgcttgagtccggtaggtcaagacttcagtgagctgtgatcacaccactgcactctagcctgggtgacagagtgagaccctgtctcgaaaaaagtaaataaataaaagaagaagaaatgaggaaatgctatggcctatggtagctttgggctctgtccacttagatcttgagttcccagaattttcttccctgattagttgggggttcatatgaacataagagacattttgcacaagaaactggaaatcaaaagtaaatgaactggctttttttttttttttttttttatcctaggaagcacagtgcagggcaccggtgactggtgctgtcacagattacacgtgctgtccccgatccccttgttggtgcagggcagcagtccaccccgcagctcctgcccttgctcctcctttagctgctccaaatcctgggctggtgacagcagctccatgaagggtgccagctttttctgcagcaccagcatcgtgaaagttgactgtcaggaggaggcagtgagggacggatgtggattccagctcatccgcggagttcccactcatttttcttccccccagttcacattcttagattgcttgtgcttttgctgccacacctaagatcccctaatccaagatcatgaagatttacacctatgttttcttcgaagagttttataggtttagccctcacatgtacatgtttgatccacttcagtttttgtacatgttatgaggtagaggtctagctgttgcatattttcccagcaccatttgttgaaaagactgttctttccccatgcattgtcttggtagctgcactattttacattcccaccagtaacgctggaggattccaatttctccacatctttgccaacatttgatattgtctgtctttctgattatagccatcctaaatgggtgtgaagccatatctcattctcattttcatttgcactttcctagtgactgataatgttgagcatattttcatgtggacattgatttttaaaataaactttatgttttagaacagttttaggtttggccaggtgcggtggctcacgcctgtaatcccagcactttgggaggccaaggcaagtggatcacttgaggtcagaagttcaagaccagcctggccagcatggtgaaacctcgtttctaccaaaagtacgaaataattagttgggcatggtggcacacacctttaatcccagctactcaggaggctgaggcaggagaattgcttgaacctgggaggcagaggctgcagtgagtcgagatcccacaattgcacgccagcctgggcaacagagtgagactctgtcaaaacaaacaaacaaacaaacaaacaaacagttttaggtttacagaaaaattgcaaagatagtactgagagttcacacataccccataaccactttccactataattagcatcccacattaggacagtacatttgttacaattaatgaaccaataatggcagattattattaattaaagtcctttttttttcagacagatttcctttgtttttacttaatatcctttcctgttcattccatgttatgtttaggcatcctatctccttaggcccctctaggctgagacagtttttcagacttgccttatttgtgacactctgggcagttttgaggagtaccagtcaggtatttcatagactgtactcctattgggatttatctgatgtttttctcatgattagactaaggctatgggtctgggggcaaccacggaagtaaagtcccattcttatcacatcatatcaggggcatacactattaacatgacttaccattgttgatgttgacctagtcacctggctgaggtagtgcttctctgtttcctccactgtgaagttactctttccctaccccccttccatactgtcctttttggagggaagtcactatgtgcagcccacatttaaagagtgggctgtctttcttcttttccactttctgtcccacgtttcccatcttttcaaaatcttcagctcagctcaatcctagacaggggcgaagagttcatttgcagtgacacagagctgcaagctgcttcccttcctctctttggccttgccaagcttggactcaggaggagcagccccatctttgagaaaagttacctgtctctatatctcccgttgcgatggagacaatagtgtcagagttcctacaaaagtcccaatctcagcagtttggtccagcattccctaaatatgcttcaatcctcaactcaggaagaaaaagaaaaagttcatcagatcattaatgtgcatgcacacacacacacacacacacacacacacacacacacacacacacacacaaagtgtgatgtagagcagaccctccgcaaaattctgaagcagaaggaatttatctttgatgtcctctctcttgccttttcaggctctccctagaggtcccccatgaaagcccccatcctggcctgttctccagtagccctggatctctttgcctctcctccttcctaaactgggaaacaataacaagctaattagtagctgggattgcaaactgtgtccaggacaggcagagcgggatggagacaccaaactctctctaggggaagaaagaggccagggagtgtgggttggcaaaagcaatgatttttaattcattcacctgttatttcttgagaactttgaaactttcctacttctgtgctttcaacctatagaaaacgcagtcatcattgaacagtgaaaaattgattctgcttctaggagtttctatttagccaggggatctagaggcagctttagatttacatttctatcactccctttccaagcctgattaaggtaacctgtgcttcccaattgccccgttatttttcatagtggttacctttggcttctcacattcccaatccaactccattttggaaatactagtcatttctcaaaaacttaggcaactttttccctgtgtgaagttttagaaaaaggtttattttcccctctaggcttattttacttggctgaagtcattggagacaacatagactttgcatttttatcaggcctctttcaaatgtgctggcactgcagttgaattccaatgactgcattcaatgatttgcagtagagactatcaaaaatgcccacttccaaagctttcctgttgagaaaagtccagacagcacagcatttactgtctatttatcctcaagataagtactctgtcgtcttattcttttcacagataattatgagcactctcatttgggcccaacatttatgttaacagccaaaaacacacaaaaagtttaagataatccactttccttcagaagctcgtaatccaattgggagtcaaggtacacacataatattgttaaataacattctaaagtagtgtgaatatgtctgaaataagtactctaggacttacatatctacagtagtcaacttatgggacaagccctcattccaacagtactgccatggctcaaaatgtgtacatttgttacaattaatgaaccatccaattacaattaatgaaagatccgatcaatggacctttcatagggttaactccagtgctcgtttaacaatcacaaaagaaaaccagcttgtctatttcaatgttagagcttggttttgtggttgcttttaatattatagcttcctatttgatcacccactttctaaagctttgactagaaatgactttaaactataatcaaaataatatccattctcaaaggagtatttttcaacctgtttcattctcaatccaccagcctcctgccatcttgatttctatccagtctagagcatggaatttaatctctagtgacactctgcccaagctcttaactcctttgcttctgtgggcttccattccacacacatggaaacaccccagcctaggattcattccactttctgcctccttggctttacacccaggtcctcagaaactgggagttctccttggcttctctctgtccctcatcctttacatgattggtgacaatttcacttgctcaatatctctcagatctgcctctttttctgtccctctgccactgccccgtctcaaggaccctcatccatcatttcaatattggatctttaaaaagtgtcttgactgatctttttgcctacaggatggtctctctccaaatcagtgtcgacactgcagtcagatcactttttctaaatcattaatctgattttgtcacttcctaaaacaattccaatagttctccaataaacattttaggataaagtccaaagtcttagtgtgtctctcatggcttttcttgatctgaaatctgtccatcagcctcacctattaccatccagcctcccaccctagagccactggcaggtacctacaggctccatccacttgtttgcccctagccctttatataccctcttccttctttctggaatacttttcattggctgatgaactcctactcaccttttaaggcctatgtctggattgaaggtctctcctatgcccttccatgatccttccagttggggatctaccccttgacttgctatcgtcctcattgcactgtgagttgctctgaagtaagtgctgaattttactccttttcatatccccagaatctagcatgatgtcttccacataactgtactcaaaagtgtttgctgcataagtaaaagatttgatgccatgaggacattcaaaaggaaaataatagctaatacttgtagagaactcactatgcactaggcactgtcccaggcactttatgtgtagtatatcttctttttttttttttctgtttgagatggagtctcgctctgtcacccaggctggagtgcaatggtgtaattatagctcactgcaacctgtacctcccaagttcaagcaattctcctgtctcagcctcctgactaactgggataacaggcatgtgccgccatgcccggctaatttttgtatttttagtagagacgagatttcaccatgttggctaggctggtctcgaactcctgacctcaagtgatctgcccttagcctcccaaagtgctgggattacaggtgtgagccacggtgcccagccgtatctcattttaattattacaggaaactctgagagaggaactattgttatcctccatttcatagatggctcacaaagagtttaagtagcctgtcccaagtcatagtgggctgcaagctttcaaaaggcaattccaagagaagaattcccaggaccaccttctctccctggtaagagactgcaccaatgactgcattattggttactgatgatgtcacgctatttgcagctcttgccatcaggtacaaacagcccctcaagagcactgaagttatcatctaaaattacttttgctgaatgatgcttcccaggacctccatatgagacaacaaaagcagcaaggaaagttgagagtcgggtaaagatgattctttctagagtcaaggtgactaagccccagttcatgacaggcaattttccgattgattcttgccttttgctatatgagctggatgattgcctcatcacagaaccctaaacttactttgctcaggcttcctgagcacaagaatgggggggtaggaaaggctttgtcacagtagggaactttccacacttgccagagaagatcaacatgagacaaaggatgagtatatatgtgccacctaccttctcactcccctatggttatttgattttctgcagatcttagagctccagagagctgattttctgaccattcaagatgccaggatgatttacttacaggtaagttgataaattcatcctcctgctctatgtctgtaacaggactcgacggtgactgtacgtcaatgtataaagttcaacaaggaattttatgaacgtcaacaggtctcacggcttctgccccaagatttttcctgactctgtctactgccttctgacctcatttcccctccctcctcatcaaactttaggacattcatcttctagctggtcttgttcctttctcatcttccctcccttcccctaagacattatccatactacagctaaaattaaaatgacaaagcacgggtctgattatggtgttcccttgctctgaaaacctgaagtctcttcagttggctacagagtagtgtaaacaccgtaagttggcatctttcctgcttcccagcctcctatcccacttccctctttcttgctccagccatgtgtcaccacttacttctccccaagaactcccatgcactttcccaactccatgttggaaaatgcctaggaatatccttctctatcccatctgcctgctgaggtactcactgtcagtaaacgaagactaggtagttcagataaatccttcctcaggaaataatgaggaaatctggatgaaatacagaaatattgtattaaaagcatcaacaacctaataagatggtgaaaaactgctaaccaaagtgtgggaggggccaggcacctagagagataaacatcgcttggggaagctttcacctgggagcctgtactgatgcagaagagttgagatgctgggatgtgcttttggcagtctctcaaaagttaagggaacaaaagatagactggtggcctaccaatggctaggatgcttaaggactgcaccgcaggcatttagatacctggaagtaaatcagtccacatgcggtcatctgttcagccaagaaagtgtcaaaacttgaatgtgcatcaagtttgctgcccaaaactgctagcatccccaaggattgtggcagaaacaaacaaacaaacatctctccgggggaagataacatcatatgaggtcataaatatttctataaacagtctttcaaacacaatgctcagcacacagtcaaaataaccaaacttctccaggagtggggcaaaaccagaaactaatattagtctttgataactcaagggtgcatatagagtagcttctcatgaatagaaaataagaatggaatacttcttaactaataaggaaaaaaaatggaacaatagtattaataaacccaaaagaaggcaagaaattaaaaaaaaaaagggaacacagagcagggggcacaaattgaagagctattcatcattcaaggtgcagctcagatatcctctttttccctaacaatcccttatctcctcccaccagtccagtgctctcttcatactttatttcaatttctaccataccgtttatcccattgtgctgtaattaattgttcaagtgtttactttcccagttgtattttgcacaccttgaaagaaggtgttctgcttattcatctttgtatcttcaatgcatagaacagggcttggctcacaatacacattcaacaaatacatattgaagtaaatttagttgaaatgaactaactaaaaaaatactgaggtgtgatgctggtggagctgtcagtgattgttcctgcctgcagagaggagcacatggctcaaggaggctatcacgttacttattccccatatagagtattaatacaaaggcttatgacccaagtggtgctaatcttccataaaaattaggctgggcgctgtggcttacgcctgtaatcccagcactttgggaggccgaggctggcagatcacctgaggtcagaagttcgagaccagcctgaccaacatgtagaaaccctgtctctactaaatacaaaattagccaggcatggtggtgcatgcctgtaatcccagctacttgggaggctgaggcaggagaattgcttgaacccgggaggcagaggttgcggtgagctgagatcgtgccactgcactccagcctgggcaacaggagcgagattccatctcaaaaaaaaaaaaaaaaaaaaaagaattaatatacaggccaggcacggtggctcacacctgtaatcccagcactctgggaggccgaggcaggcggatcacctgagatcaggagttcgagaccagcctggccaacatggtgaaaccccatctctgctaaaaatacaaaattagctgggcatggtagcacacgcatgtaatcccagctacttgggaggctgaggcaggagaatcagttgaacctgggaggtggagattgcagtgagctgagatcatgctattgcactccagcctgggcaacaggagcgagattccatctcaaaaaaaaaaaaaaaaaagaattaatatacaggccaggcacgatggctcacacctgtaatcccagcactctgggaggccgaggcaggcggatcacctgagatcaggagttccagaccagcctggccaacatggtgaaaccccatctctgctaaaaatacaaaattagctgggcatggtagcacacgcatgtaatcccagctacttgggaggctgaggcaggagaatcagttgaacctgggaggtggagattgcagtgagctgagatcatgctattgcactccagcctgggcaacaagagcaaaactccatctcaaaaaaaaaaaaaaaaaaaagatttaatatacaaagaaaataagagataattagatttccttttgtatcacacactatacaagtataagcttggtgattccagaaaccatcttccatcccacatggtgaaagtcacgtgaaagtggggcagtgcacaaagcaaaacagaaccagagttggtgagagagacaaatccctgaaaacattgaacccctggattcagctatgactgaacacatatccaccttgacttccttggctaatagccgataaactccttctgttgcttaagctaatttgatttgtgtttctgtggcttggaacaaaaaagagtcctgacaaatacaagagacttctatgagaaattctacatatgaaggctcttgcactagtttgtattgggatcggcaacaaggtatagatggtcagaagacactggaacactgatagatctgactgtaaggaacataaaaactcagtaactctgattttttagccaacagattagaattcatgcatccatgttctcactcataggtgggaattgaacaatgagaacacatggacacaggaaggggaacatcacactctggggacagttgtggggtggggggaggggggagggatagcattaggagatatacctaatgctaaacaatgagttaatgggtgcagcacaccagcatggcacatgtatacatttgtaactaacctacacattgtgcacatgtaccctagaacttaaagtataataataaaaaaaaagaattcatgcatccaaatgtgtattgattctttcatagtagctaccttgggaaaccaaatatttattccagccatttgacaagaactaagtgaaagggcaagagtttctatggaaaaggcccccaaattagaaggagcatgaggtttagaggcaggtggaaacatgagaatgggaagggtcaatcccagggagaggggatccagggaccatcccacaaagagcaacgaggtctggaactagccaagcgctagcagccagctcattgtccaaggactcttgagaagtggggacctgagcctctgttttgagtcttgtagacctagctttctggggcctaccattccctgcagagggcaaggcctgatgatgagtgaggtggaggagcaaggatgccccttctcatgggaaagctctgagacatgcccagacaccgtgtcccctgagtgctcatgctgctgagaatatgcagagcccacgaaccaacacattaaggtggatttgcttcggaccagaagcatgagtcctggacagcctagagagcccttgaatttcctcccttccctgaagaaatgagtaaggatgctataaatttccttattccattttcaaaagcctcagtgaaaatttgcttcctctctgtgtccatctctttgacatgtatatacacaatggccctgacaagaaaagtccctctcttgtatataagctgccatctctctccgcaccaccccccatgaatgataatacaatatttattaaggcttaaatagcactgttaagtgcacatgttgatttagaatgatggagtgtgtcagcgtacagaacaggaactcagccacagaccagggacccacaaaggacaaggagatatatcattagctaaagacccaagctagcaaatgtcatcagcagagacaaacaagtccttaattagggcttctttatacctactgttaacaccaatttttataagtgtattttcaaaaataatataacattatatatgcaaaaggttaaaacatttaaactgtacacactggtatgaaataaaaagcaaactcccatctgctgtctcccacacaagtcctttaggaaactcttttaagctttttttttagttcttctgataagttaccaccataattctaaacaatatgcatagatttcaattttttggcttatcatgattagataatatcaagtcatttgcactatttaatagaggaggaatttagttcacttgcaatattttcaatcatctctctcgattttgagtttcattatattattgtatttggttcttcgagtagtgacctttttatttttaaataatatacattatcctttatttttgtcccatcttctttccacaatatctcttgtctcatcccaaagtcaaatgaagaaagttgcacctacacttgcccttccccttcctgctcacaacttgaattcccctagcttgggcatcacctacacagtgtcaattgttagacgcacattctagtctataactgccttctgttttgattataaaaattgaaactagcaagcatttagttataactatgtaaatgtgattatgtaattattgatcactatagaaagagtatgatcagacccactgaaaaggaaatatgatcatatatgtcgctagctgactctctctcgaagaatgttcccaggagaaggtcaaatggattctcttttcttacattccatcagttgctcaaaaccaggccacgtttttggtggttttatatttgaaccaaagctttcttctctggtttttccattatttttttctctctggtttttccatttttttccttggcatttcaaattgtgcttcttctttcttgaatagagggggaaaaaaatacacctgtttctttcccactgggatgagattttccagcttcttcattgttctgcctgttaactgatccccattctatgcttgaagtttcattcagagtcttctgacttcatattctgattcgagccgtgtttttagacctgctgtggaagtgtcccccgagattcctttctgtttcacacctagaagcgtggcactgtttcttggaccatggctgcttctttctctcctacatctagatgattggtaaataaagatcctgaattcatccagaatccagcatggctggaaaagtgtttatttcaccttcatatttgattaacaggttggctggatattaaattttagatttaagatcttttcttcctccaataaatttagactataatcttttgaccaggcactacggctcatgcctgtaatcccagcgctttgggaggctgaggcaggaggattgcttgaggccaggagttccagactagcctgtgcaacatagcctgggtctctatgtattagttggttttcatgctgcagataaagacatacccaagactgggcaatttaccaaagaaagaggtttattggacttacggttccacgtggctgggaaggcctcacaatcatggtggaaggcgaggaggagcaagtcacatcttatgtggacaacagcaggaaaagagagggtttgtgcagagaaactcccagttttaaaaccatcagatctcgtgagacccatacactgtcacaagaagagcttgggaaagacccgccaggtccctcccacaacatgtggaaattataggaactacaagatgagatttgggtggggacacagagccaaacaatatcactctacaatttgaaaaaattaataaataaataaatactataattttctgtcctgtgttttgatgggaaatctgaaatcgatcataccctcatccttttttatggatcatctctctctctctatctctctctctcttttcctgtctttctctctctctggatgctgttataatggcaatgtacaatagaaacataacgtgagcaacataagtaatttaaacttttctagtagtcacattaaaaaagtaaaaagaaacaagtgaaattaattttatagtgtatttttatttaacccatttctgtatatccaaaatagtatttcaacttgtaatcactatttttaaagctattatttagatatttcacattacttttctcatcctaagactttgagatccgtgggtgttttactcttgcatcacatctcaatgtggaccagctgcattcaagcactcggtatccacacatgacacctggctactctgttggacaggcccagtccagaatcgtctctttatctctgtggtgcgttgcttcacctacagatatgggtctgttttcattttcttgctcagaaatcagtgcaccttttgaatttgtaatcttgtgtttttctttaattgttaagctcacactacttcaatttatgtgttcatttcctctttcctcctgttctttctctcatcacttgaatgctgaatctcctggaataatattttgtctcttaattttaacttcatgcttttcatcttttcaccattttgctctgtgctctaagagattttatcaaattcatcttcagtcattttattatattttttaattttggcaattatatctttaatttccaattattcttttttgtcttctggagattctttttcatagtagcctgctccttttttttccttctacttctggttccttcttaaacaaaaaattttttgagacaaggtctccctgtgtcacccaggctggagtgcagtggcgtgatcacagctcacggcagttttgaccacctaggctcaagtaatcttccaatttcagcctcccttgtagctgggactacaggaatgcccaagaaatttttttttttttagagatagggtctcactgtgttgcccaggcaggtctcaaactcctggattcaagtgattgtcctgcctcagtctcccaaagttctgggattacgtgtatgagtcactgcacctggccaaaaaaatatttttcaatttacacataataattgtatgtatttatggggtacatagtgatgttgcaatacagtgatcaaattagaataattagcatatccatcatctaaaacacttaacatctttgtgttgggaatattcaatatcatagtagcctgttcttgttttatggatgcaagatcctggatctctctgaggagtctagtaagatttttaaaattctctccattcctgaaatacattttttcattgggttttgttgttcatgttaatgttagtcttctcttgtgtgcaacttgcttccttcattgtctgttgtccttgggttggcaacattgtctactatgcgttcatctgcatgaatgaaacactaagttgactaatatgggaagccatggtgggcttcctccaagaaggtatacatttccacacatgacctcacctcttatctgaattgggatggttgtggtggctgacagtcaactcagctcttgagagctggtacctccttacacccttttccccaacccagggccacaaatttaaaaaggctttatagtaggtgtattagtcagttttcacactgctgtaaagaaatacccatgactgggtaatttataaaggaaaaaggtttaattgactcacagttccacatggctgaggaggcctcacgaaacttacaatcgtggtagaaggcaaagaggaagcaagcgccttcttcacaaggtggcaggagagatatcgtttgaaggaggaactgtcaaacacttataaaaacattagatctcataagaactcactcacttccatgagaacagcatggaggagactgcccccttgatccagtcacctcccaccacgtccccccatcgacacatggggattacagggattacaattcaagatgagatttggatggggacacagagccaaaccatatcagtagggcaccagcatccacacagggagctctagccttctctaggcagctcagttcattcttagatacagctccgttgtgatttattaattgaatctcttacagaaactagaatctctgggctgttgatgctgtccctactttcattcttagtgccattatggatttttcatttttagatgtctttactgtcctttcactgggattttgtgttcatctgccatcttgcactaacggatcaattacctttaagggaactattctgcctcccctaaagccattgttacctataagataatgaacaaggttttgacttttgaattttattttcatgctagaatttctattgctacttgtgtccaaagcacagtgttttacactgacaaatagtgatccatctcaacagaaatttaaacagagcccaggtacatgggtatgttccaattttcctctccagagttctttttttttttttttttttttttgagacgggggtctcactttgtcacccatgctggagtgcagtggtgtaacctcgactcactataacctccaccttccaggttcaagcaattctcctgcctcagcctcctgagtagctggaattacaggtgctcaccaccacacctgactaatttttgtatttttagtagagacggggtttcaccatgttggccaggctggtctcgaactcctgacctcaagtgattcacccacgttggcctcccaaaatgctgggattacaggcatgagccaccgtgcccagcccagagttcttaaattgaaacattttttaatgagatgtgtagagatatggccaactcttgtcttctcccttaataatcagtggtttcgtagaattgagaagtgagggttgttctgtaatgttccatctacaatagagtgggaaaacgctggtctaatggtgaagggaagtggattccagtatctgcatagtcactctcagttctggcgatggcccccaacgctgtgcctcagtcgcctcatctgtaaagagggcataaacactcttcttgcatgtctcatagggctgatacgaagaggaaaagagctgatgtgctgacacatactcagtactcactgagtattcgttcatcgattaaacgaagggttcaaggcaggggtctctcattaaggctgtggctgctctgtggctgaaggccatcagagatgatcaacctccttgccagcagccagcttggcatgcagagtggatcaagctctgccatctctcccagaggtctttccaggatgattttggtggtcactgcaaaagcaaagatatactaatcaccctgatctgaccactgtacattatatatatgacaccatcactatgtatcccataaatatgtataattattatgtgtcaattaaaactttttttagagcaaagatagccctcttcatggccttccccagcttgctggccaccggccttgagaagccaacggtttctcatacgatggaagagaaacaggaacagctgcctatgttaatacaccaggaaggccagggagccgatgggaggctggggattatgaagggcctaatctcatactcttcatgtagacacgggggaccaagtggctctgagagggaaaggatgtgctcagttagtgacagagccaagactagagtgttttgtacttgtgtgtaatcatcacagatgccatcacccaagaccacacctcaccctaaagctccattttgaagcacttcctggagtgggtatctcttcttaccattgcgaagctgggttttgggaaaccgccctaaacccacctcaagcccaagaaggctttgaccccaaatccatacaaacacctgctggaactcacagttggaagagatctcttggagagcatgttccacttgcccagtccccaggccactcttttttacagtgacctccaaagcctctggacccagctgccagctccactcctggctctgaggtcccccctggcaggagcacacatgccacagctttgcaccaaatccccaaagtgcccagcacattccaggctcccactgtctccaagggaccctagggccctggtagaggagggtaatggcaggaagccataatatattaaaacagcagattaaaacaaacaagagcattttggatcgtattacacatcactttcctcacatctgacaacagaaaaaaatcaaaggcggtaaaagacaatcgtagaccataatggtccaataacttggtgataaaagtgcttgtgggagcagcgtgggcgtcggcggctccgggtgcaggaatcaaagccctcttccagatccacagtggtgtattcagaggcattactgcttaagtgctcgtttaagacttcctccaaaatgcagcgcacttgctggagaatcataattaggccccaactgtgggccatattcacacattgtgcatcattcttaaagatgacagaaaaaaaattacccagggctatgtggcatggatagtagatcttttaccattgtcctccatgaaagaaaaaaaaaaaacacttaataatcccctgcctagactcatagctttttgaatactgagcaatatgacttagttttgttttcaaatggaaaaaggaaagctaagaaaacagaaggctgtgagcagtggaactctggggtttattttacagcctatagatgtggtcaaatccataggaaagtggagtgtaaaggatcttccatttatgaggcactgtccaaaccaaagtcagaccaaaattccagaaaaacctcagattgcgttaggcaagagtataccaccccagatctgattaaacatttggaacgtgtcaacttctgaaaaacactttcatttatttatttatttattcatttattttattttattttatttattttttcagacagggtctcactctgttgcccacctggagtgcagtggcagaatcttggctcactgcatcctctgcctcctgggctcaagcaatcctcccacctcagcctcccaagtagctgggactacaggcgcagaacatcacgcccggctaattgttttttgtattttttgtagagacagggtctcaccatgttgtccagactggtcttgaactcctggactcaagcaatctacccatttacttagcatcccaaagtgctggaattacagaagtgagccaccacacccggctgtcatttaatagtctgtatgctgaaaaaaaatgccacaaaaatgtgcagccatttttccatatctcctccccatttccttccctaccttctcaacccaagcccatttccatccctatgttttggctcatgggaaagagctttctaggaattgaaaaacaaatctgcccatgactcacattctccatgccagcctcagtgcctggctcactgctgcctttgcccccagggcaaaggtttcttgggagaacttcgttcaggtcaggtcaggtcagctccccaggaaaacagacctaaacctgaattgaggtcatcctcctcatttttaatctgaacttacctactgctgtcattttttcatctgcttttttcaactgatcccctaccccaaaagtggcatctacttattgttttttgttgttgtttggggtttttcttgtttgtttgttttcatttttgttttgagagggagtcttacggtgtcgcccaggctggagtatagtggtgtaatcttgactcactgcaacctccaccttccagattcaagcaatcttccaacctcagcctcctgagtagctgggactataggcgtgcaccatcacgcccggctgattttttgtgtttttggttgagacaggcttttgccatgttgcctaggctggtcttgaacttctgagctcaaactatccacccccatcagcctcccaaaatgctaggattacaggcatgagccaccatgcccaacctatttatctcattctattcacatagatttatacatgtgatttatagatttatctaaaaataaatagtatattttcatgacaacgctgggtggtcagtgacagattgttatttttcgctttacagattctaaaatctgcactttcataagagcctcatagctaatgaaggaggtatattacaagtcagtgagaaatgaatgaattctttgaatgtgatttggaagaaattggctctcttggtggtgtaaacatctaaatccttatctcacatcataaaataaaataaactgacatattaaaattataatacctgaaaaacatggaaaaccataagaaaatgtagataagtatttaatccttgcattgaaagaagtttctaagtataaaataatgaaggaagtcacaagggaaaggactaacagactacacaaatattgtaaacatctagatgtcaaaaaattaaaagcaaacaataaactgaaaaaatattagccacatacatgacaggcaaaaggttaatattcttactatacaaggcattcatacaaatcaataagaaaaagaaacagaaaaatgggtaaagattatgaatagataatttacaaaagagaaaatacaaatgtttggctaatacacataagaaagctattcagccacaaaaggaatccaaaaaattaaaaataaagtcaccagagatagcttcctgcttatcaaatcagaaaaaaatagaaatattaatagtactggatgctacaaaagtgaagtgagagaagaatataaattatatgacctttctggaaggcagtttgggcaatgtctatcaagaaccttgaaaacactcgtgttttctgacctggtaattcctttttaaggacttcatcctaaaaagtaattagaaatgtgggctaagctgtttgtaaaagataatccttagagagtgagttataccagcaaaataggtgaacaatgtccctcacccagagagtggcttaaattatagtgcatctatataatgaaatatcgcaaagacattaaaattgaaaaataattttagtggcaaggaaaaatacccatgcaatagtgttaaatgacaaatgctgcctgcaaaatagtctatagtatctcaaatatataaatacatgcttaggagaaagaactgtaaagtagtatcaacagtgtttaccagtgagttgaagaatagtacatactttaaaaaatgcttttctaattttttacaataacaggtatttattttataatcagaaaaatagaactgagaaaaccctctttttattttttaatactgatattccatttatgtttttaaattttttattttaaaatatttaactaacaaagattgaatatattcaaggtgtacaatgtgatgatttgatatacgtagacattgtataatgataaccacaatcgaattaattaatacatcaattaccatccatgctgtccattagattttcagcacttggtcatcttataactaaggttgaaccctttgaccctgtctccctgttttctccagcccccaccccctggcaactgctattctactctctgcctcaatgagttcaacttttttaggttccacaaatgcatgagatcatacagtatttgtccttccatatctggcttatttcacttagcacagtgacctccgggttcatccatgttgctgcaaacaagcttctctgttttcaatgaaaaagtttcaaaaaggtaaacatcataatggaactccacatctggtcacataaatccataaccacagttttttctgccctgtgaatttttcattttacagtaaggacaaaacatacaagtacgaagcccacaatactttaaaatcacttctgagttggtcaatatacataattgtaagtatatagttattagtaatcaatcctaattagtgtttctgtgttttgctttgtctatttaatatgatttaatatttaagtgctcatgtgtcagcatagtcaacatgtgtaacttgttgacagtgtggcaatcactgctatgtgttcaccaaacaattccccttccaccctgggcttatagcaagactacatttcccagcctcccttgtagttagatgtggccatgtgactgggttctgactcctagaatgtgggtagaagtaatgttgcctccagacctctggatctggctcatgaaacttcccttgcaatcctctgttctcactctcttccctcatggatctatcagatacagggaggaaatggtggagccactaaacacagaagcctaggtccctgagtgatggcatacagaaacctctctccccaacagacccacattgagttgcaatgtgtgtaagaaataaacttttattgtgctaagccaccaaggtttgtggttatttgttaaagtagttgtcctaccctaagcccaaagacttagctactatcccattgtcttgacagatcgtagtgcttaaccactttcccttcttggatattttcattgtttctaaatgatgccgtgattatctttgaaaaaaattatggtttttcatttgctccctttggcttatgcttatggagtatatttcccaaagtggcattaccaatgcattatctgaggataatgttcatagttcttgttacactactaccagactgctttcaagaaatatcggagcaaatgagtgcagcatccccaatacatggtgtttcccacatctccagcaacactgggttttattatttttagctttgtttgccaatgctgtggcaccaactagaaagtgcttccaaggtcatttacacttgcaatacttagtgagagttcttatactatagagtatgtggcagataacattttgatctacgaacctcaccctacttactcaccctttggtctgccctctgatataggcagccgcagggacgttcacacgcctcgcattagtgaagtgatgacactgcaaaatacagtaaaaggaatcaagctttcacttctgcattacaaaataggcttctggaaactcacagcagagaccatagttttaaggggggaagaagctttctgtatttcaaagcttggcttttgagcataagaagcctcaggcctgaaagactcaaggcatatggttcaggcataaataatagatttggaagaatatgtgatcagtcagagccagacagccctgccccaggctggataaggtttccctggactgaggcagtggagaggtagagaaggaagaagaggcttaaatggtgggtcctgaaggcagaaggctgcgacaggagcagcaagaggcagatggacgctgcatcccctacactgctcatgtccacgtggtacagtggagaaggctgtatgcaaatgccactcattcaggaggggttcctgcacagatgctgtcttgagcactgtggatatggcagtgaatgaaaaagaccaagtccttgcttctgcagaatgatgttctaatgggggaaatagacgtcaacaaacaaataaacaaatacgcaggcagacttcgctacagtgcgcctcacagacattgtgtattttacaaattgaaggtttgtggcaaccctgcatggatcacgtctgtctgggacatctttctgacagcatgtgctcacttcatgattctgtgtcaccttttggtaattctcgtaatactttgagctttttcattattattattgtgtctgttacagtgatctgtgatcagtgatctttgctgttactattataattgtttttgggtaccaccaacagcacccatacaagatggcaaacttaacagatgaatgttatgtgttctgactgtttggactccctatgccctgagacacacaaatattgaaattaggccaatgaatagccctacaatgggctctaagtgttcaagtgaaagtaaaagtcacacaactctcactttaaatcaaaagctgtaagtaattaaacagtgaggaagacacagtgaaagccaagacaggctgaaagcaaagcttcttgtgccagttagtcaagttgaaaatgcgaagaaaaagttcttgaagaaaattaaatgtgccactccagtgaacacacagatgataagaaagcgaaacagccttattactgatgtagagaaagttgtagttggtctggatagaagatccaaccagccacagcattcccttaaaccaaagcctaatccagaacaaggccctaagtctcttcaattctataaacactgagaggagaggacaggagaggagaggagaggagtggaggaggaggaggaggaggagaagaagaagaaggagaaggaggaagaggagaggaagaggagaggaagaggaaggaggaggaggagtaaagaaagaagaaagaagaaggaagaagaaaagaggaagagaagaggagttggaagctagcaaagtttggttcaggaggtttaaggaaaggagccatttccacaaacatcagcacttgaggtaaagcagcaagtgctgatggagaagctgcggcaagttatccagaagatctaaataagattattgatgaaggcagccacactaacagattttcaatgtagatgaaacatccttatgttggaagaagatgccatctaggactttcatagctagagaggataagtcaatgcctggcttcaaggcttcaaaggacagactgactctcgttagggtctaatgcagttggtgactttaagttgaagccaatgctcattttccattctgaaaatcctaggccccttaagaatgatgctaaatctactctccctgtgctctgtaaatgaagcaacaaagcctggctaatagcacatctgcttatagatggtttactgaacattttaatcccactgttgagacctactgctcagaaacaaacaaacaaacaaaaactctttcaaaatattactgctcattgaccatgcatctaagcacccaagagctctgatggagatatacaagaagattaatgtcattttcatgcctgctaacacaaaatctattctggggctcatggatcaaggagtaattttgaccttcaagttgtattatttaagaaatacattttataaggctatataggtgccatagtgattcctctgatggatctgggcaatgtgtgcaactcactttatcataatgtttgctttattgtggaggtctagaactaaacccacaatatctctgagacatgcatatatatatatacacacacgcatatatatatacacacatatatatacacacatatatatatgtgtgtgtgtgtgtgtgcctgtgtgtgatatatatatgtgtgtgtgtatggtgtatgcatatatgtatatgatgtcagtggtgataagtgctctgaagacaaataaaacaggacagagagtggtggatggtggaattattttaaataaggtggtcagagaaggcctttctaaaaacatgatatgtgagcagttgaagtgggaagggagccctgagcatatttgggcatagagcattccaagaagtaagaacagcgagtgcaaaggccgagacagaagtgtgtcttggcatctgccagacctataagaagaccagtgtggctggagcatgtgagacagagggaagaagacggtggaagggagaaagtcagagagacagcagatagacagtggatgggctgtctggacagacaggatggaggcagtcttggttaacacagggcctctctcctcctttcccagcatggtgtctaagtcccagaaggcactgaggggtcaaggcaattagagtagtgtgcccagggggacagtgtttggatgtggttgatggtcctcaaggcctccaccgcatcctcctggctccgcaccactagcctctatgttcactttccactccctacctctgggccttttctaagccacaagcagacagttggctttccccgtacctttgcttgcagggtgccgagcaaagttcggaggagaagttggttcctggatcctggcatccctttttcccctgctttgcatctgtgatggttaatattgtcaacttgattggattgagagatgcaaagtactgttcctgggtatgtctgtgagggtgttgccaaaggagattaacatctgagtcagtgggatgggaaaggcaaacccaccctcagtctgggtgggcaccatctaatcagctgccagcaaggctagaataaaacaggcaggagaagatggaagagcagatttgctgagtcttccagccttcatctttctcctgtgccggatgcttcttgcccccaaacatcagactccaagttcttcagcttttggattatgggacttacaccagtggtttgccaggggctctcgggcctttggccacagactgaaggctgcaccatcagcctgactgaaggctgcaccatcagcttccctacctttgaggttttgggactcagactgatccactgctggcttccttgctcctcaccttgcagacagcctttcataggactttaccatgtgatctcatgagttgattctccttaataaactccctttcagatatatgcatatatcctattagttctgtccctcaaaagaaccctgagtaatgcagcatccttgctcctacttaaggccacactactgctggcttggcccaccatcatgtatatgcaccagtttcaaaatccccacgccttccttgagctcaggaattcaggctgaagtcaactgattatgtgaagaagtaacatgtacattgaaatatgagttaaggccaggcatggtggctaatgcttgtaatcccaacactttaggagttcgaggcaggaggatcacttgaaaccaggagtatgagactagcctgggcaatatagcaggaccccttctcaaaaaaaaaaaaaaattgccaggtgtggtagcacatacctgtggtctcaacttctggggaggctgaggtgggagaatcactcgagtccagaaggttgaagctgcagtgagccatgattgtaccactgcactccagcctgggcaacagagtaagatcctgactctaaaaaaaataaaagaaagaaaagcaaggaatgaaagaaaacaaaagaaaagaaaagaaccctccatggaagttagttgctaagcaagataaatctctaggtgaacatggaagaggagtttttccttttagcagcttcttacctatttctccactctggcaggtgagcgcgcgcgcgcacacacacacacacacactcgcatgcacaccaacacacccctgcatgctccagaagcgcaaggatcaggaatctggtcccagctattgacagatggccactcctgttctaaatgaactgccggcctcggcctccctttcatctcaaaggccatttgccataacctcattcatctgtgcagactgtcaaattctctctcccagacttctcctgtgaccttcattttattctctgctcatgcctgagtgtggcagctgaactggattgattaaagttttagcactgtcttgttttaattcaagagctaaactgagcatttaaatgaactcgcagcaggactgattggcaggcttctggaatctgattaacattcctcctgaggcactcttaccctccttatctctgctctgtgtccgggttggtttctgggtgaaattcactgttggtttaaaatgacatcattggagcaagtgagagtagacgaatgttcacttccatccatccatccatcactggagaccctgggttcattaagcgtgtgccaggcacagtttccctctacatcccataattcatccatgggtctaatgaaccaagatggagtttgtcagtttgccccagtttgactagatgggacaattctttggtgctcagaatcttttatcctatagagagagactgtgaggggaagagagagcaactctcagcacagtgacataaatgtcagtgcacatccattcatcatttctacctacaaacacagtgcccacaagagccgggacactgaacccacaccctttcttctgcaggtcttggtctgattgctatttttcagggaatcacctggcctctccattcagttatcccactgtaattgcctgtggttgctaagacagaggaggaagcatgggaggacaggcctaggcatctatcacccagggctggatcaggcatataacttcataccatgccccctctaaactctcaagggccttctcatccatccatccatccatccatccatccatccactcacccatctgtccatctgtctgtccatccatccatccatctatccattcatatatttaattcagcaagtatttatcacttgccttctatgtaacaggtactgtgccagatgctgggattttttaaaaacatacccaggaggttgttcttattcagggatggtgtgttaggctgttcttgtattactataaaaaaaatacctgtgctgggtaaattataaagaaaagaggtttcattggctcacggttctgcagacagtacagaaatcatggcgcatactgcctgcttctggtgatggcctcaggaagcttctactcatggcagaaggtgaagagagagcaggcatctcacagggtgagaacacgagcaagagagcgagtggggaggtaccacactattttaaacaaccagatctcacatgaattcagagccagaactcactggtcaccaaggggatggcactaagctgttcatgaaggacccgccctcatgaccaaacacctccaccaggccccacctccaaccctggggattacatttcagcaggagatttgaaggggacaaatattcaaacaatatcatacggtaaggccagcagattaggagatgaccacaactgaaaagatagtttgttacttacggttcccaagagaaggggacacaccatgccacaccattcagagccacacagggaggcaccaggtcgagtcaggaggcaggagtgagggaaaagcatgggcaaagtctttccttcatttgtggttctcaagggaaggaacgggcgaggcagggtaagccactgagcaagtttaggattggataggctgaataacgtcagcaggctctgggctatcagggtggtccccagttgaatggtatctggccctagggtgattttgggcagaaggataacgtctagggtttcctaagcctgatgaaaggagccagtttggggaatggacttgggatgagttggtttgcatatcaaaggcatcttgcaggcaagttgtttgctacctgtaggaaatagccaaccctgggaagggtagtcccttcctgggtccacagggccccaagatgtcaaagcatcctaaaatacagaaaacgaaaacgtggttaatacatggggtttcagaaaatgatgtctgcccttaaagacttcacagacttcaaaacaaacaagagtttcatagcatatggcacaagctgtgccagtcacctttggggatgtctgcccagccacaaccttcccattcgtgggaaatacaccccagatctaaaggggtgggctcctcagtggccggccagctttatagtccatggcccatgcccctggcagtggctaattggaccaagatggacacatggtcccaagctcagccaatcagatttcctctcccactaatttgggattgcaattcagagaccggtacacctgtgctggcgggaacagcagctggtaaacacaggagccaggagacagtctgacttcaccgtatgtatatctgtgatctccaaccctgggtgcacagtggagtcactgagagtttttaagaaatactgaggccagagtcccaattcagaccacttcaatcagaatctctgaggatggggcccaggtgtccgagctcctgtcccaagcctgactcactcctcacacccacaaaagtgaactgtcctgggcctgcgtcccccctccaggagcatcacctctggccctgtcccttcatgctgtgtagaagtgacaggactgtgctatgattgttgtggatattccacacacacatagagtcatggagcacagcaacagggagggggcatgcttaaattaacacataacattcgtgcatttgcagggggtgcatatgatcttttgttgcatgtgcagaatgtgtaatgatcaagtcgggatatttagaatctccatcaccttgagcacttatcatttctacgtattgggaacatttcaagtctgctcctttagctattttgaaatatacaattcattgttattaattacaatcaccctactctgctattgcacattagaaattattccttctgtctaactgcacatttgtacccattaaccactctcttcatcccctcctcccccacatacacacaaacacttcccagcctctgataactataattctacttcctaccagagggagcatttttttacccagactggagtgcagtggcactttcttagctcattgcagcctccaactcctggggctaagcaatgctccagcctcagcctcctgagtagctaggactacaggctcaagccaccatatccagctaactttttttaaaaatgtttttgtagagacatggtctcaatatgttgcccaggctggtctcaaactcctggcctgaaagccatcttctgtatttgtccattttcacactgctgataaagacatccccaagactgggaaggaaaagaggtttaattggccttacagtttcacatggctggggaggcctcagaatcatggcaggaggcaaaaggtaattcttacatggcaatggcaagagaaaacgaggaggaagcaaaagtggaaacccctgataaacccatcagatctcatgagacgtattcactatcatgagaatagcataggaaagaccagccccatgattcagttacctccccctgggtccctcccacaacatgtgggaattctgggagatacaattcaagttgagatttggtggggacacagccaaaccatatcagcctcccaaagtgctgggattacaagtgtgagccactgtgcctggtccagggggagcgtgttaaatcagtctcccactcaacttctgataaaatgaatgtccatcaaaagaagatgtgcagtgcacccaagaagtcaatacatcaattaaccaagaaatatttttaggaagagagatgaataagaggaaagacaaggttcctggcctgggggagcgtttagttcagctggagagggctttagatgttgatgtagatatgtacacatataaatatgaatgcacgtggcagtctacttgattaacattagtaaaccaagcatgatacacactggaagaacggcactccatgcgatcagaaaggaaagattcctctgggctgggctagtccaggaagacttcctgaaggtgggggcatttaacctggtcttgtgaagaaaggtgagtttcaaacaggcctatgggccagggtaaccagctctgtaggtgcttgaaggacagccatcctctgcacttggtgtgcagaacaggccccatcagaaggcgttctcagccacagcctcaggctgtgtcctcctccttccccacagagttaattttttatcactcaagcaaaccagagaaactcaaaagcttgaactaataatggtggcccaagtccaagcatgggtacggacccaggtgaggtcctctaacctctcagaaagcaggtatcaggagacaaagggggtgattgggtaactaggggagacaggagacctggactcacccctgcacagatgctacctttcaaagacacaggtgcatcaaacactggaacccagatccactcacagtcaaactctgccccttctttaaaatagctgctctagggagacagagatggagaagagctttgcactcactgctcactcttcccaggagctaagcctaaatactgagggcctggactaagaataaaacttagtcatggctggacgtggtgactcacacctgtaatcgtagcactttgggagaccaaagtgaggggaccgcttgaggccaggagttcgagaccagcctgggcagtatagcgaaacgctgtctctacaaaaaataaaaattcaaaaattagccaggtgtggtagtgcactactggagtctcagatatttgggaggctgaggtgggaggattgcttgagcccaggaggtcaaggttgcagcgagtcatggtagctctgctgtactccagcctgggcaacagagtgagaccctgtctcttaaaaataaaataaaataaaacccagtcattccaaagcaaatgtctttcctctatttccatattcacaaatccctccccagctctagaggaactagccaccccgtgagccgtcttccctctgagtctcttcttctttccctcggctgatcccttcatcctcccattctgcctctctccatctccctatcaggaccccttattcctcagctgcaatcaactcccaagtattcggcctgcaattcctgaacttccacctggcactgctaagctttcaaacccacaacctcgggtctgagtttcaggccaggagtgtccctttctcctgccctttgggggagctcggatttctacccatccacttttaaaacatcccttccctctactcagtttgagaataacatctggggacagatgtgtctgaatcatcccgacttggggcttggtttccccctctgtgcaatagagagtggactgtgccctctctctaaggatgaccgtccgcacacaccccatcctgagtatgagctttttccaggacggcagtttattttcagctgtaggctttcagcgacactggctttgcttctttctgctgccgtgaaagattttccatgccactagggagtataaatgctcctcacatgcatttttgaaagacctcggaaacctctgcataaatcagtagaagttcatttatggtttcagaatattctggctaatttatctggtgtcaaagatcctgagcctgagccttcagtttccaaactgggccctgtagggctctgctgcatttcccttgcatgtttgttttggctggccctgaaattcgacccggccacaaggagacctttatcattatccaaagagatcttccccttcccaatgacacactgttcggaggtttaactccgagccagtgcttcttccccttttaaaaaaccaacagcaaagatagagctcttccttccaagccaccaggtcgcaggtctcagatttcagccttgccctgatgtccttcctgtgagtttgaactccgctgtgccagcatgtaggccctcccaacaccctcctgctggccttacgcgggccagggcaggcagtgtacagaaacagggacccactgatggtgatgcaatgaaaaaaaataacctggcagtcagcatgtttgagctttctggggctgtcttaccagaaatcgctgtagaaacatgtggctgacattgttagcaattagcccagtgtccagccccagaggcgattttacatccttcctggctatggtttgagatttcattgtttgatgctccctgcattttgctctctcagtatttcctctaccctgaatcatgtggccaagccttaaactcctgtcctttgaggacaatcagaatgacacctttagtgtttgtgccttattttatggcctcatgatcttgtgccctttggagttcaaaggtcacatcaggcagcaggccgggaggtttttgatgtgacctttgaaccccagaaaacaaaagaatggaggcccacagagaccatccatctaaaaaatgatcctataaagaatgcaactcaatcagcccagagcatgcaaatcacataacatttttatggagcaccctgctaaatccaaacttacagccagaagaagggacacaaaccccatgatcccaatacataaatcaaagcttgagaaaagcaaagacatgagtttacagctggctaagaatggaaggatttgcaaaatgtgatttatacatttgtttcctcccctcctcccacccagtctacacacaaacacacactcacacacacgctggtcaataccacagcaccacagggaaatccagcattttcctttccaaaggtttgccctgtgctaagtctaccatggacagacatgggagagcaactgaaggccaagagcttcctccctggccaccagaaccatcctcagagacaggcagaaagtccatagggcaggcagccagataaggaagatgaggacttgccatacaggtaaaaggctggccccacaaagaaggccacattctgtagaacagatgtcacctcccctatgacacagattgtccctcaacagtccttaatacctggcacacatgtccccagggcaaaggtcagactaatttctgaattgatgagaaatactgttcaaatagttagagactgagcaggaggtgctcctgtttctcatgactattgaagttttggttttttaaaaaagaaatatttaagtgtgtttctagatgtctagataacatgctgatgctgggtaatagatcttgagaagtctgccaagtatgtctgtagtagcaaatgttcagagaccagaaccgtggagtatgaaaaagagatccccttttaaatgaagattggatttgcaattaaaatgcgtgtcttctttcttttcttttccatttttttttttgtttgttttttgtttgtttgtttgttttttaagacgagatctcactgtgtcacttaggctggagtatagtggcacaatcacggctcactgcagccccgacctcctgggctcatgtagtcctcctgcctcagcctcccaagtagctgggaccacaggtgcatgccaccacatccagctattctttttaatttttttgtagcaatgaggtcttactttgttgcccaggctagtcccgaactcctggcctgaagtgaccctcttgcctcagcctcccaaagtgctgggattacaggtgtgagccactgtgcccggcctttgtgtcttctacagtgaaactgaaaaattgtgtaggtgcatctagatcttcatcatggatgttgcatctggaagaatctctgctctatctcatccaggttcctcctttctttttaactttgcaccagattctaatgtctctgggagctatgaatatatttttaactctgtctgaacagtaccacagctgtgtctaataaaactatgccttcaacagtggcaccccaaagcaatttcagatgaaataagaatcctagaaaggaccctagaaagaaaaaatcctggccttagaattggaagactaactctgtatgaccatggtcaagtcgcttcacctctttgagcccccatttctgaaagttgaatggtcctggtgctttctgagggcctgctctgcacaggtcctgcccaggtgtcgggataacctctatcctgtcagatttaacactgcatgacttctctgtttccaggacgtcttacttagacacaaaagaatgaactaaacagctcctcctctacccccgttctttaactcggggatttcaccacctgtttcctacttaggagaggcaaaatgtaacccagtggacgaagccccattttccaaatgattcctaagcagcaaacatgatgttgaagtgttctgcaaaattctccatgcaattttggaagcccagtctaaggaatatatatgactgctgcttaagctgctcaaaaataagtttaaccagggtctcagagtctttctggcccaagactattgtggctggaaagactaggaaatcatcctggctaatctcgacctctttacacattccacacgtgctctggacaggggctaggggacactcaccagaggtcacagggctaattaggcacagtcaggaccaaagctcaagctcctccagcgccggcgcacactaacagctaccccagtgcacactgggccgtggcactggcttcttacccatctctacaacaaaactgtgggtagatgttactattgcatgtcagagatgaggtgctagagtcctgggaggttcagttacttgcttaaatctcacagctgatacatgaggagccgggattgggctcaggctttgtctgattccgggcctgtacttgtaagcacccacctcagccctgagaccccatctctatgccacagcgtgaagcctcacacacaggagatgatgagtccacagaacctgagtgggaacagtctcagaggaagggaagaagggggcatgcagtgagtttaatggtgcccccctaagagatcctaacacatcctaacccccacaacctctgaatgggacctgttttggagaaggcaactttgcagatgtaattagtttaagtatatcttgaagagatcatcgggattatccaggtgagtcctaacccaaatgacaagcatccttacaaaaaacagaggaggagccgggcacagtggttcacacctgtaatcccagctacttgagaggccaaggtgggaagatcgcttgagcccaggagtgcaaggctgcagtcagctatgataaaaatttaaaaataaaataaaaataaaatcagaagagaagacacagacacaggagagaaggccatgtgaagatggaggcagagatggagccatgcagccacaagccaaagtatgcctggagccacaagaagctggaagacccaaggaagattctttcctggccctgctgatgccttgactttaggctttctgggctccagcattgtgagagaataaatatctcttgttcaagctttgtaggcccgcatagcatgagagtcgttgggtacttaggcttctgaggccaaggcattaggttctgcagaactgaaatctccacactttggtaagaatgggcgctgaatagccccctggcaagtcagccccagccccagctgtgctctttaccattacagagctcctaagaacagaaggccttttgcccattggaacccagttccttactcttagtaagatttggcaattgagccaagacatattctagcctgagtcaaatatctagattgataaattgtccaagtcaggtgtgtgttggggaaagattcttcaatgaaggtttcttgtagatcctaaccctcccaaatacatgttcaatgcaattagatttttaaaacttccatgatatggttaggctttggtcccctcccaaatctcatcttgaattgtaatccccataatccccacagtccccatgtgtcaagggacagaccaggtgaaggtaattgaatcatgggggcagtttcccccatgctgttctcatgatagtgaatgagctgtcattcactatcacgtgaatggctggagatgacctgcttgggagctcaggccacctcaggccacacctggctacactccaggctgaagaaactgataagttccaagcaaaccgaggaaactccccaagcacaagagtcaggagctcttcccccttcacttggcacttctccttcctgccatcttgtgaagaaggtgccttccttccacttcaccttatggcatgattgtaagtttcctgaggtctccccagccatgtcgaactgtgagtcaattaaacctctttcctttataaattacccagtctcaagcagttctttatagcagtatgaaaagagactaatgcattccatttcaatggacattttcagaaacacacttctatgtaaagcaagttccgtagtgcagacttcctgcttgttcccaatgggtccttgggttataagactacaaagacagaggtggctgggcttctttattgaaacttgctggctctgagacagaacattccagcaggcagacaggagatgaggatgcttcatcacttcagcactgatggactgaatgcttcttctctggatcactgtatcctagaagcccagtctgaggatgtgaatagcaacatctacccacagctttattgtaaagatgaatagagttgatgtgtaaaaagccagttctctggactggcgtgcacacacatggaagtagccattattacaggctgggaatggaggaacatgtgcttcagtcttgactgttcctaattagccgtgtgtacctacttttctcatctataaactagaacgagcatctgccctaactaaggggcagattttgagggaatggcacagactacttctcaggctgtaaaatggggacatgaatgtttttaattgtcatccttgacacatgattccagtgttttcaaatattttcctggtaaaacagaggtcagatcctcctttgctcatgctgctgtcagaagcccagacagcactgttctggtggccagagatgacctgcttgggagctcaggccacctcaggccacacctggctacactccaggctgaagaaactggtaagttccaaacacaccgaggaacctgcccaagcacgagagtcaggagctctgcgttacatatgtcatattttttctatctagcccatatttaataaacccaattttttaaaaaagtaattgagtctcaatcctcagaagcaaatcttggaaatatggaaatatttgaagacgcctccaaagtagataaaagaaaaatggagggtttcaaaaatagcagcttatgcaagatttttgataaaatgaaatccccataatataaaattccccataatataaaattccagaatacatagtaagacctctgacaaggaatagagtcagacactgcttccacctatgaatcatgccaagaaataactacctctcattgggtgttgaaaaatccttgtaaatatatagtttggaagaaatataaaagccgtactttcctctgatttcagaataaagactcttcctccatcctctgactcccacaaacttcgggtgcacacacatgcacgtgtgcttacacacgcacacacaaacatacacacacacacacacacaaaatgaaccaagaaaggaaggaaaagagatcaggaatgagagagcccactaatggattggcttaagtatagaacaacatcccatcactgttctagaaaataatcaatcgagcacttaattttaaacataaaagtaagctgccaggagactgttaatagataaccaaatgaattaacagttgtaggtgggatttgaaaccaggtcagattttccaccaagctccaggccctatgcatacaaagggcctcaccagctcgggcacttgatctcacactgtttcaaagtgggatatctccttttagccaatatccctcctcagcgggcttgtcacttcaggggattgttctttgtgcatcttccataaattttataacaccactactttaaaatattgatgggcaacttggccttggcccaggcccacagtgggttagcatggacatgaaaaccttcaggagggcagaaacaggaagaacacattccccgctgccttttcgtaagggacaattgtgtaagtgcggtggttacctgagctggagacctgcccagctttgatggatggctctgccctctgggaggctgctgagagctgtttggggacaggagggcactcaggacacacacaggcaatactgaggtacctatagacctgcaaagggtaagtaaaatccacacataatcccccaagttgttctaacctgaaactcaactttcttaacactcagactttttgcaaagttattgataaataagaaaaaatggctttgtcatgtgtctcttcttcctatgcccatcaatcccattcttcctataaccctatcaaggcaagtgaccaaaaagtaaatggtagcaaggaacagaaagagcaggacaggccgggtgtggtggcttacacttgtaatccaagcactttgggaagctgaggtgggaggatctcctgagcccaggagtttgagtccagtctgggcaacatagggagacatcatctctacagactcacacacacagaattagctggccatggtggtgcatctgtagtcccagtgatgtggtttggatttatgtccctacccaaatctcgtgtagaattggaggaggggcatggtggaaggtaattggataatgggggcagatttaaccttggtgatctcgtgatagtgagtcctcataagatctgatggtttaaaagtatatggcacttctctctcattctctctctcctgccaccatgtgaagaaggtctttgcttctccttcgccttctgctgtgattctaagtttcctgaggccttccagtcatgcttcctgttaagcccgcagaaactgcaagtcaattagacttcttttgactttgactacccagtctcaagtagttctttatagcagtgtgaaaaccaacttatacacctagctacttgggaagctgaggcaggaggatcacttaagcccaggaggtcaaggttgcagagagccaggattgtgtcactgcattccagcctgagtgacagagcaagaccttgtctcaaaaaacaaaaacaaaacaggacaagagaactgatcccctagattcctgccatcacactctcttcataatactcccagaaaaaaactataacaccactaagaacaatacagcaatagtgtgctaaccaaattaatacaagttaataatgactaccatttattgggccttcaacacacatacacacactcatgcacacacatatatctcagacactgcactgtactaaacacattacatatgtgatctcatttcatcctttaaaaaaaaatctgcaagaatagcctttgactcagacaacacacttccaagaacttttcctatggaaatgatcaaggatatgtccaaagattttgtctataaggatatttgtcaaaatcattgtttagtaatatgtcatgacaaataagacatgtccatgagatgttaaatgagcaatacagagtatagaagaaacatatgagtatttttataattttaaagtatgcataaaatatgtggggttagtttcatcaaagtgtcataagttcatgcgtaatttccccttttttatgtatcttactttccacattttaaaataaattttagtaagaaaaatatattttaaaattatgacctaggtgctatgtccaaatattcataggtgttaatgaataatagcccactacagatacaaagccctttctagtctacattctggttttacatgttgtctcagatgattctcacaccatcttttcaggtgggcagagcagatggcttataatgctaaagatttttaagcatacaaaaaataattaaaaggctgggtgcagtgtctcatgcctgtaatcccagcactttgggagacagagacaggaggatcacttgaggccaggagttcgagaccagcctgggtaacatagcgagaccccatctctacaaaaagaaaatttaaaaattagcctggtgtggtggcatgcacctgtagtcccagcaactcaggaaactgaagcaggaggagcccaagagttctaggctgcagtgagttaagttatgatggcaccactgcacaccagcctgggcaacaaaaggagaccccatctgttaaaaaaaaaaaaaaaaagagagagagtaacacatcaaaccaacagcctttccctgtgacccacaggcaggcacactcaggcctctctgaaaagaggctgcccttggctgtggtccacggggtgtctgctccaggctcccaatgttcattgtgggggtgctccaactgccgtgaaaataatctgacttatcactccttgggctccccatactcccattacttcttaggttctgtaggattctgctctgttcactgcaggaagggagcaaggtgggggaacattccagaatacatagtaagacctctgacaagggatagagtcagcaatgtgcaggagctggctcatgctggctcaggaaagccaatctttaacaactcctcccaactctatgatcagtaatgccacgttggtagcttggagccagcagcagtggtagtatttacaccatgaaaatcagcaaatgctacaaatcagggttcctttttctcccagagagcccgttgttaaacgtttatcagcacaccactggatgcagtctcagaaagaaaaattcgtatattcaaatgaaggttaatccctccagacccctgctttaattaagcaggactacagctccacagactaagcagactgtgaaggttgttttaaaataacatattattcagaaaactgtttatgtatttacaaaccttgccaatttgcccactctccatccctccttgaggtctcttgtttccttttgctgtgtttcccccagagtcaaagaaagcccacctaatacagttcttttgtttataaacttgatggacccaaacaatgtttgaaacagcccagctctgagcagggacagaagaatgtcctgctcaccacggcagtgcccagtcttgccccgaagtcagacttcgctgagccgaaagccttgataacgtgtttgcccctgtcctccggcttcccagtcgttgggccgtcttcactggtgcttcctgaacaatctctacgctgcacttgaggacgactcagctgggagtgaaacatgatcaggagataatttggcccagatggctctaatgcaggcaggagcatttggctgtgcatatccttagtctaggggaacccatttaaatttttttgagaagggaatgtaaccaagcagccacacagcctcaaaatgctacctcatgttatacagctgcaatgagatgtctgatcacgctcctggagagacattcggctcttaggaaggtaaagccaggctagcctttgctgctggataccaccacggctcggctcggtacttggcctttgggggattcagaagggatcaggcataaaaccttgaatatattcctagctcctgaggatcaagggattgcagcaaagggtaataccgcaactggaaacaggagaaagcatcgcagaaacacagagtgaaccaggagttcggaagaggcccagggagaggcttgcgggacacaaaacggtgaagtggctgcacagagcagctgtctttatttctgtcgagctctgaggcataggaaggggttagaattcactatttgacacagttttccttttctgtcatgcaattgacaggagaaagatacaaataaaagaagctgcttgtctgcagagtgtagcttcgggaaaagattagtttgcttcaggaaaaataggacccatgcaacccgaggctctagagtatgacggggacacattggtgacagagtctcaccagtgttagtgaaaaggtcggctgccttcaggagccagctggagctctacagctgtgcacacagggttccatctcattctctccagcgtagtcatggacactttaacgtggagccctcccagaggaacagacgggaagagaccactttgttccccactgcctaatcttgagaatgagcaattcatgctcccctaaagtgggtccttacccactgctgcgttggtcttcccctgtgacaagttttcagggccggatgaggtgacaagtaaaacaaaatgtacttttcagacagacctttgtcatcggaaagcttttgtcccttttagccctctggctgaaactgttgattgggaatcactttccatggattctgttagtactacaggcccatgggtttttggtggagacaaatggaatcttactaaaaagacttatacccctagtcactgtgggggtaacttttgctccaaataggcagtgattatagagagagctgcctctctatgtcgtgaatgtggagaataatacaagtatgcaatccatagatatcatttccaccatcccagaaaagttcccttttaggcagcagtgtgctggtaaatggtgactaaccagcaatctgaaaaacagtctatgcatataatgtaggtgtgagagtatgtttactataaattttactaatctaaaagatgtggaatacacaatttacaaataataataaaatacacaatacactttcctacaaattccatatagtcaattcattctcagagaatgcttttgttgatgtttaccaagctctcgcatctgcagccaacctatggttgcaattgatcaacaagtatagttcacacatatcgacattttgtttacattcatgagcaatgcaaatatgaaacaacttctttgtatgccaatacttcacttggataagttgaataatagttttcaaataatggaagactattcaagtgttcaagtgtttgtgaaaatcacagtgtaatggctacagaaacaacttatgtactgtgttattaacgtttttcccatcactttcttaagtctaaataatcaacgacaaaaaaaagggcgaaataattagaaagtaatgaatttagaatgttacctttgtttttaatataacttaatttgaaagatattattttaatgattaacttgaaattttaacaattggttcacaagccaacatgccatgtgcctgtgcaatcaattccatgccatatatacactttttttcagataaggaaaaggtaaaaatacagaatactacatggattatcaaggttaaatctattctttcttaacatgacaggaaagtaaagctttgacccgcaggggagactggagaggggaagttggcctgtctgttcccatttcaggagcaggctaagagtgtgtttctggaaacaaaactgtcagagtgaaggctcacaagaaatcagaaacaggacccagatctctacccaagggcttataacaaaggctcaaagcaggcttttttccaaaaatgtttttaattccaacatccatcttaatggcctactgtagcctaatttagccaatagctgttattctaaaaatggaagctaatgattccagctaaaaacaacgaagccggtactatcacagtatgttgtaagaaactgattatcatggggtgcatttttcacttccttttctctgaagaaaggcttagtaagagtcccacatcaaaagcaaaagcatttctttctctcacgggaccccagaataggaggaatgtgttctctagaggcaaccacctcccagaactactctttggcaagatgcatcagacgcacggagcgatggtctggctgaagggcaccacctgctattgctcatcatattcgtgccattcaacaaatattagcagcatcaatttacttctctgaagcacctgcaggtacccaccacttggctgagtgctatatagctctacacactttatattttgcaaaatacgtgcatatggaaaagaagcacaacatttaaggcaaagatcagataatagccgtattgcacaagtgtctagctggagaaaattgacaaaaaaaatagaaagtttgtaaaatgatcaaaattttagatatgcaggataaatatgttctggggatctaacatacagcatggcgaatgtagttaataatacttcaagtactgtagacagttgtccttctatattggcagggaattggttccaggatcccccacagatactaaaagttatccacactcaggtctccattttgctattaaaaattgagaagctgaataatcttaatttagggcattagtttccgggtgagctcagaattttcttattccagcttgtgacatctcaatgaatttcccatttccacctaacgttaggagccctgttcctgggccaccttcaggattctggcagaaggggtttcaggtgaggtgagaaggttaagaggtgaattggaggttcttggctgatgcacctgtgccttcacgtgcccccgtgcgcacacatagacgttcgcttacagctgccagctttaaattctgccttcccgctgtcgttgggcaaggtggtcctttgccgcatcgacaggagctcatacggcagagcccctaggaatgcaggtgcccccagtcatctacactctgagcagggggcaggtcttgctgctcactccacttggggtatggctgcagcctaatctctcaccctttgtgggtaataataatatactttggataagcacaatggcatcacattgagcaaaggatctcttttacatgccttaagttatggtttcttgaattaaatatggaatttactagaaagattagcccacctcttgcatcagcgtgacctggaggtgagacatggagtcaaaggagattattccggaactttaagatttattgagtaggccggggatggtggctcacgcctgtaatcccaacactttcagaggctgaggcgggtggatcacgaggtcaggaattagagaccagcctgaccaacatggtcaggccccatctctactaaaaatacaaaaattagccgggcatggtggcacacgcctgagtagcccagctactccggaggctgaggcaggatgatcctttgaacccaagaggcggaggttgcagtgagccgagatcgtgccactgtactccagcttgggcaacagagcgagactccatctcaaaaaaaaaaaaaaaaaatttaaggagtgccctgccgggtttcagacttgcacagtggagtgcagtggtgcatggggcctgtagcccctgtgttttggccaatttctcccatttggaatgggaacatttaccaatgtctgtactcccattgtatcttggaagtcactaacttgcttttaatgttacaggctcacaggcagaagggacttgccttgtcttggatgagactttgaacttggacttttgggttaatgctggaatgagttaagactctggaggactgttgtgaaggcatgattggttttgaaatgtaaaaaggacatgtgatttgggaggggccagggtggaatgatatgatttggctctgttccccacccaaatctcatttcaaattgtaatccccataatccccacgtgttgagggagggacctggtggaaggagattggaacatggagacagttcccccatgctgttcttgtgacagccagttctcacgagatctgatggttttataagggggctcttcccctttgcttgctctcactcactgccatgtaagacatctgcttccccttctgccatgattgtcaatttcctaaggcttcctcagaaagccgaaccgagtcaattaaacctctttcctttgtaaatgacccagtctctgtatttcttttcttttttttggttttgggacagggtcttcctctgtcacccaggctggagtgcagtggtgcaatcacacctcactgcaacctcaaactgctgggctcaagcaatcctaccacctcagcctcctaagtagctggaactacaggcatgtgacactacacccagttaatttttactttattttttgtagagtcagggtctccctatgttgcccaggctggtcttgaactcttgggatcaagcaatcctccaaccttggccttccaaagtattggaattacacatgtaaggcacggcacccagcctcacatttaaagggcttttaataatgagttcagggccaggtgcagaggctcatccttgtaatcccagcactttgggagactgaggcaggagaatcccttgagcccaggagttcaagaccagcctggacaacatggcaaaaccccatctctacaaaaaatataaaaaagtagcccagcgtggtgaagcactcctgtagtcccagctacttggaggctgaggtgggaggatcacttgagcccaggaggtggaagtagcagtgagccgagatcgcaccactgccctccagcctgggtgacatagcaagactccatcttaaaaaaaaaaaaaaacaaaacaaaacaatgagttcatttctcctgatacgaagcaaattttgagtgcaaaaatttattgtgatttttaaaaagttaagtagttcaagaatgcatattctttagaagagcactatacatgcagggacctgggctttatcatcaccctggcaagctaaactgcctcatcaacactgtccctgcaaaagtttctgtagaagttgattcatcaattaaaagccagatccgtatatacacagctgaagaaactgccagcagttcattgctaattaccagggcaaacatttgtatttcaaagttgaccaacaggatgacaattctcaaagctctaaaaagattttgtcctaccaaacactagcctaatgtatgaccgttacccatccgtggttagtaacaatcaaaggcaacacttcttacagcaacaaatgccatgagcagtgatctcaataaattcctctttgcctgtcactataaaagccagtctggtcccaactcagtatcaaggacattattccagacagcacagtactgctatcaattcaggtttccttagcaaataagtgcttcagatatactcgcaagggctcctgaattggagttttctgcatcatctccataaaaatattttttcacctctaaagtcatcaaagaattgaagcaggcccttgggaaatatccttaaggggagagagtggctccaaaaataaccttccttccagcaccacaccaccagctcagagaattcacttcacggtgggacggtcactcaaagtctactgtgaacctcatccccaaaaaggtaatggcaaaggctagaggaaaatcctaaacaatcacctatgccttgtatctttctctagaaacacaatctactagtagaaaaaccaatttgaaattttaaaaatgtggatgctactcatgagggctgtcatcaacgtaggaaaactattaactcaagtggatgacatgtttcttttcctgtattaaaaaagctcctcacatttaataattctgatttagatcagttttgatttaacagacagcatgaatcaaacttagctaaaaccttaatgatgttgtaatatttattaacatagccaattctcaatatagaagatttatgaatctcctaatacttccactttataaactggctaaaaaaaaaaaaaaaaagaaacgctcttttgaagaacaaagtttcagggcttggaggaaagagaaagtgatctttacaaattcttcatggaaccaccggggatcttttaatccatttaaatacaaacatagaagatcagactctgatctgacattatttctatatttttagaaacacttttcactcataaatccaaggtgacaatggcattaaatggcattaaaaatatctacaggaaaggactaccacgaaatacaatattatgataacagttattgcattaaagtggttacttttctgtattcttcacatgtcccattgtatcactatacatttttataataaaaaatcgtaaattaagaaagaattcaagcaaagtattgttgactttataaaataattcttaaaacaaatgttcagaaagaaggcattcaactaagatagagaagatgctggatggagaggcttgcaaggtcccgggaggagctccagggtgaagctcatcactagcctttccagcagcactgtccctggagaccagaagcagtgggagccccttccctgtggcaccacggactcccaccaaggcacgtatcatgaacactgtacttgtacacgtttattacccttgggtgtatggggaatctaagagcacctctgaaatccatacttgattcctttttacattgaggaaagtgagattcacacacaaataccaagatgaccaatgaatggtggcctcgctggcaaaagcagccattgcaggtaaccaaattgcctccctagcattctgtaacccatgggcttagggaaagattaagtaacatttctttttcaaattcacttcaaatactcaactgtgttcatttaaaaaacagcaactatatgcacgagactaaacagatctcattcacactgccagcccacagaggggactctccgtaccctttcaggagggttttgggcaataaagccaaaatctgtacttaaataggtgtgtctcataagacaaatttttaactcatttattaaaggtcctgatggacattccaaactagtaacttatacctagagagagaaaatacaaatgcttactgtatagttatataaaaatagaaatccatcaagagtccaatcctcaagaaaccacacaatttgtacccaaaggctgtatatatatcaaggaaggatgacttccttccttgatctctaaataacaccctctccacatcggaggtatctggaggttgggcatttgcctaacgccacggggtccaccggcgggggtcacagctgctggctggtgaagaaggatttagtctccctgcagacaggattgacacagagcggacagctcagggtcagctgcttggaacacagctcgtttgactggatgtgtgaatgcaccaagtcggccagggcctggaagatagacaagaggcaaagacgcatgagaagcacagggtctgctcgtctgccatgccccctcctccagctgcccaggtcagcgctctggcttggggtttcttttcatccgagtggtgagccctttgaaccaaattctacagcatcttcctttcctgagaatcctcagcttacagaaagttaaaacagagatttcaggagatgaaaacctcttaccctacccactaggccttttctctggaaagcaggttttaaatcagacatagttataggtgggtagaaatcagaaaattggggctatctgaaggaaaaaagactgagcagataaggaattcgattttatttttgtaattaattggaactccaaatgttctaatatgtgagaaaaaccaatattctgcaagagtttctcagaggattactctctggtatgttctactaaaacgattgtaacactgtagataccttagagaacaatggatttccattaagagactcagctcttctgatgttttcaactccacactgaatcaaatgagaaaagggaggaaaaacacagatatattttattttcctttttttttcaaagaaactgctacaaaaaaataaatacacacagatacacacacacaattcaaagtctgacttcaactgttcgcagactgctcattaatgaaaaatactcatggggcagggctgtatgttgattctgttatcataaattattcctcaattcttatgtccttccccttccccattaccttcctaaaggtggtttgtttgcaaatcctttttgtggttacacttgatgaaattctcaagcaatttaaatctgtttaccattctttttttattctcttttgctagtgcataattttacagactcttcctaagtagaatgttactgtaaatatagtttcatacttgttttgatcccaagtgccaaaatgaggtaaattaacttatcgactataaaatatgtattggacctacactggaaccaattcagagttgggttttaaaatatattcttttttcttttttttttttttgagatggagtcttgctctgtcacccaggctggagtgcagtggcgcaatctcggctcactgcaacctctgcgtcccgggttcaagggatcatcctgcctcagcctctcaagtagctgagattacaggcatgcaccaccatgcccagctaatttttgtatttttggtagtggcaaggtttcaccatgttggccaggctggtctcgaactcctgacctcaaacgatccacccgcctcagcctcccgaagtgctgggattacaggtgtgagccaccaagtctggcctgaaatatattcttatggagaaaaatctaaaggaaaacaatgggaggattgtttctgtaccatccctgctcccggctccaaaaatatccactgcctaataactgaaaatggtctaattatgatttactcaggtagttaggattcttctctttcccttttcttttgatagcttttcaattacttgatcttttattttttatttattttattttatttatttatttatttattttttgagaggcagtctcagtctgttgcccaggctggagtgcagtagtgcgatctcaactcattgcaacctccacctcccagattcaagtgattttcctgcctcaggctcccaagtagctgggattacaggcacgtaccaccacgcttagctaagttttgtattttagtagagatggggtttcaccatgttggccaggctggactcaaactcctgacctcaggtgatccacctgcctcggattcccaaagtgctgagattacaggtgtgaaccaccacacctggcctcagctacttgatcttttagattagcattaacatcaggagactggcatgggaaaaacgttgagattcagcaaacacatggatctcaactgaagaggctgtattctcaaacttcatataaaagtcagttacaacagaataaccagcgttggtaaagggcattctccaacaatgttgatgggagagtcagcgatacactgactagaaaaatatataccaacactgaaattccatgtgcacctgtagtcccagctactcaggtagctgaggagaggatcacctgagcctgggattttgaggctaaagggagctatgattgtgccactgcaccccagcctggttgacagagccagatttcatctctaagcaaatttataaaatcataataaatttaaaataaaaaaattgatttccaaacatattggtataaactatattttcactgaagttttagcaagttcacaattagccaagctcatagtgagatacagaaggcatctttaaacaaaatccatagacaatgctgcaaccatttcttagccaattacaacttgcctgcaaatcctgtgtcagaaccactgacaagaaacttaggtgctccctaacttcacccatgtctgattgatgtccagcatggaaattcaaattccacggggatcaggtgttggctcaagttctgcccccacccactctctaccctgccctacacctgctgcccagtcccagagagggtgaagtctcctgcaggatggtcctccatctatcatacttggggtgaccagggccagaaactctggcagagagggaggaaagggtttcttgggtcccaacgcttccacacttcccataaaaataaagctatatattggaataggttttaggctggctctcaaaagccaggacatagatgaacaatagtttttctcctccctgaatgacaattcacatctatctcatattacaagacaccaaagatggtatttgttatttcaataatcagattgatcacaacataacagcaaacagctaattaagtgagtgcataaaagaggtcaaggaaatcacatcacacattgcttccatgttcatttcacgctcttcttttaaatgacaatgactcctatatgccttgacactcaacaagaagccatgtaataatagccctgagtaaaggtcatgattaggcaaagaaaagaaattataaaacaataaaatgttttcctttggaattagtgagaagtacatttcttttttcttaaagaaatatagttgttattactttcgagtagcccagtaactcaaactaaacaaaatgatgtcagccacagtgatccctggggcacctggtttaaggaaagcacaggtttcccctcccactgcatggaattaactcaatgtgttgagattattactcagatgaagtattattcaggagaatgaggacaccgtacatgcaaacaaatacagtaaacaatatttctgaatgatacattagttagttgcagaaaaaatttccttttaaaacaagtcatgatgggaaaaaggcagatgggtgcatttacctccttggctaaaacttgagagtactcgatgtccagctcatacagcgtttcaatatggtcactggtaaatgctatcggaaccaagaggatattcttcctccccctctcacaaagccctttgatagattcgtctgtttgaggacccaaccagggcattggaccaacctatgcgaaagatagacgaatgcgtaagtggactatgcctcctgacggtctgtagtacccctgtttgcccccctgggcacacgcactgcccactgcgggcaagagccactctttacacctgcttgaatggattttgatattttcacatggaaacttgaatcctagaagttgcctcaatataaataaataacagtttctgtcattgcagctaaaggtaaaatattaaaccaatggagctccacgagtcacttgatttccccttctatcttactcgcttgcagagttctttctgcccatggtgagcaatcaggttatggaagagcctgaccatgtgtaagagccaaatctaaccattttataactcataaaataaattttaccaataagagctggccgcccgccagtgtggaagccacttaccttggattgccacaccagtcggtaggggttgcagtactccagcctttccatgactttttggacagtggcgcttacctcctgaggatatgggtcgcctctgttgaccacctgcagcagagacacaatgggtgttcagccattaacactgggaaggccccgagagcctctgactatgtgctgacacagtgtgagccctggaacaaagccctccctttctgtctcctgcaccaatgatgatatggtctgagttcaatcaccaaacttccttagttccacttcttcatcagccaaagaaaaacaccgcagtcaatcatctctaaggtccctaagagggtggagaattccatgttccacgttattcatgggggactcacaagatctaactaaagaggatggttctctctccctcatccaatagatgaagaagacacagaaaagctgggcaggatgggaacttctaccctggtggtcatgtgtgtagttgatttcacaacaggaactgaaacagtgctgcatggacaatgtacagaactgctggatttatggtaaaccctggtggaattagaggaggaaagcagcagcacatcactgcaggttacaggcacctccaagagtgtgacctgcaccttccacttcctctctccccactcttcctgcaacaatggacaacaggcaaacactttgtgcacagcaaatgtttcatacatgatcccttgttaatacctttgaaaattttcaatgcaaattttaatgctttaaatatttactgtgtactgactccctagccctcacctggctttattttcttctataacatatattgcctgctaatctaccataccattttcatatgtattatgtttattatcttttctccctactctctgcaaacaaagatttttctctgttttcttcattcccatatcctatgatatggctggaaacagtgcctggaatatagcaggtgctcaataaatattggtgaaatgaaatatactgatagatggggcgcagtggctcacgcctgtaatcccagcactttgggaggctgaggtgggctgatcgcctgaggtcaggagttcgagaccagcctcaccaacatggtgaaaccctgtctgtactaaaaatacaaaaatgagcctggtgtggtggcgcacacctataattccagctactcaggaggctgaggcagaagaatcacttgaactcaggaggcggaagctgcagtgagccgagattgcaccagtgcactccagcctgggtgacagagcaagactccatctcgaaaacaaaaaattatatatatatactgacaaattattttatgattattactactggtctgtttaaaagccatgggaggcataaatgtagatggaatgaaggaaacacaaagttgccattaggacagcaatgtggtaattactacaaacacgatctacccatggatgctaggaaataacaaaatctctgtattgtcttaaagtatctcctccaagatatttttaattacaaagagaaaaatagtaattttaggatggatcaacacagcagacacacccttaaacaagtggccagggatcacatcaccagtagaaaagcacgctggcatcacagacccccgggtgtgaggcacagagcagggccccgcacccctgtgggttcttgccaatgatgcatcaccgcaacctaatcatgagaaaacttcagacgaacccagatggagggacgcaccagaaaacaactgacatcctaaaaatgactcctcagaaatatcaacgtgtggtggggcgtggcgcctcacacctacaatctcagcgctttgggaggctgaggtgggtggatcacctgggcccaggaggtcgagaccagactgggcaacatggtgaaaccctgtctcttcaaaaaatacaaatattagctgggtgtggtggtgtgcacctgtagtcccagtcactcgggaggctgaggtgagaggctcacccaagtctggtaggtcgaggctgcagtgagtcgtgactgcaccacagcacaccagcctgagtgacagagtgagaccctgtctcaaaaaaaaaaaaaaaaaaaaaaaaaagtcaagctgatgaaagacaagccaagtatcaggactgtcacagattggaggatgctgaggaaaccccacagccacacacagtgtgggaccctggactgggtcctgggagagaaaaaggacatttttggaaacacaagtggcatccacatgaagcctggagtgcagttaatagtattgtaccagcgctggtttctcagcgttggtaactgtacagtggttgtgtaagatgttaacactgggagaggctgagtagagggtatatgtactcttttaactctgtactcttttaatcagttttctgtaagtctaaaaatttcttcaaaataaagtttaaaaagttgtcagaagggaacgcaggggaagagaagagtgtgctagatcagtgttctttctcaactctccaatgtcctccccatacctgacttatccttatgacactgtggcatttcccggtcccacaaggacgctccagcagccaaacctggaagcagcgtgctccgtccccaggtgaaagaataaggaagtgaggccacggtcagaggaggcaaggcagcaccggaatccccacatacaaaaatgggtttcagccaggcacggtggctcatgcctgtgatcccagcactttgggaggccaaggtgagtggctcacttgaggttgagaccaacctgggcaacatggggaaaccccgtctctactaaaaatacaaaaaattagccaggcgtggttgcgtgtgcctgtggtcccaggtactcaagaggctgtggcaggagaatcgcttgaacccaggaggtggaggctacggtgagctgtgatcgcatcactgcactccagcctgggcaacagagcaagacccgtctcaaaaaaaaagcaaagcaaatgtgtttgctccaggctggttcaagggcttcccttctggcatctcaggcgaggtctcaccttacataggatgaagtggcaggaggatggacatgtgaaaaggattgcatgacaccagaaaaggaaaagcaaacccattaaaataggcaggcttccagaagagaggaatttatcttcagagcctcctaccgtccacacgaggcccagcagagacgatgagtggaaaatctgcagaggcttggccctagtagccaccagggggcggtaaggcccagttacaagagtggcccagacactgaggctgactccattcccgacattgttaaaacctcaatcacccctgtgaagatgtaattatccacctctctgggttggaaagcactggttttaggatagaatgctagttctgagcagatgaaactggttgcttattccaagcgcttctatatatcatacagtacactagcttgatcattcttgtttccaacaatacaacagctatggcacagattgtagcatctggatgaatagcctagtgtaatatgatgaactaaggaacagccagatcccaacttgatcctctatattcacttgcaaaaatgtggtcctgagtcttagcaaactgcaatggctgcctaacaagtcctgaggacaaaagcatgggattgagagcgcttgtctgaatggagacccccccactcaacacacagaaacatcaagctgagctctgctgacagggcaggcaaaagcagccttctcttaactgtcccacttattagaaagtcttatatatatcttcaagttatcattttaaagaaaagaggagctgggtgtggtggctcacacctgaaatcccagtactttgggaggcctgggcgggtggatcacctaaggtcaggagtttgagaccagcctggccaacatggtgaaacccagtctctactaaaaatacaaaaaattagccaggcatggtggtgggtgcctgtaatcccagctacttgggaggctgaggcaagagaactgcttgagcccatgaggtggaggttgcagtgagccgagactgcaccattgcactccagcctgggtgacacagcaagactctgtttcaaaaaaaagaaaagaggaaaagatctatttacaacattataatttgaattcattgttacgaggttttaagaagtgaggctagttagcaccaagtctgagatttgagaattcattcttgcactgggcttaggacataatggaagctggacccattttacacatttagaaaatgaaatcacccaatcctctatcactaggtcatcccagaaaatgttcttacttacagacatgggcagtgagtgagcagaaaacagaatgaccacctcgcttctcttctcaagtggaaaatggtccagttcctttagaatatgatctgcaaagcactgagtgagtaacaagaaaggaggataaagaggaagggaagaaagaaatggaaggaaaaagaaaataattttaaaatgaagcctacaccaaaaatctcagagcaaccctcaaaaatccgaactctcttttttaaaaaattgcaaacagtccagcctctcagcattggtttatcatcaaaatggatcataacagtttcaggggcctagggaatttgctgggaaacttctaaagctcgctaatggctcactgcaaatgcgcgctgtggatctgcttcccctcgggaaggacagggcacacttccagatggaaaggaaacacagatgggaaggagttgttttaagacctctcatttgctccgttagcaggaaaacagcttacagggtctttctaaagcctccttagtttggctttcaggcataccacattaaatacattagtcaggaatagtagggaaataagaaaatactgctctatttttataacagtttcttctgagcctcatatccccatcaagtcaatttttataaaaaccttcacaacaacagatgacaggtgatacacacccattaaattcacagagccgggaaagatgtggtaaacttaggggcccattcagtcacatctgtggaacttgagaaagaacatggttcctgcctccccctccaaatctctgtccaccagaccagggagctcccttcgtctagccggcactttgattcacgtcgataggtgctgaaataccagaactgaaggggctttctttcgtcttatactttaatcattctctgtcatttagcttataaaaaaatgctacaaaagacacaaatgggtcaactgacaaaatcagaatatgaatgtaaattaagtaaaagtttaaatattgacgttaaatttactgaagttgaatgttgtattgtggttatgtaagagaatattcctgattttagaaaacacacttaagtgtttaggtgtagaggatggtgatatatgcataacttattctcaaatgggtcagaaaaagaaatcatgtttatacaaacacagacacacacacatacatacacacacacggggcgtgtaaatgataaagcaagtgggatatacatgttaataacacatcaataggccagacgcagtggctcacgccagtaatcccagcactttgggaggccaaggttggacgactgctggagcccagaagttcaagactagcctgagcaacatggaaagacctaatctccacaacatttttaaaaattagcagggtgtgatggcacctgcctgtggtcccagctactcagcaggctgaggcgggaggatcacctgggcccagaaggttaaggttgcagtgagctatgatcgttccactcaactccagcctgggcaacagagtgaaaccctgcctcaaaataataataatacagtaatataggtaaaagagtagatgagagttccttatactattcttaatcttgtaacttttctgcatatctaaaattatttctaaatggtcctttgtaactttttaaaaattataaaggacaatttatcagaaacatgtaaatctgcacttgttggtattttgatacatcagtggtcagtgaaaactatgggataagcaaactattccctaataaatattgagatattattaatctttccagaactctcaaaatttggtaaataaatatcctaaggcataaaatggtacctaaagttaagttcccttttcagaatttataatgtaaattctcagcaaatgtgacaggattagatacaaacgaaaccaatattttctggtctttgcagtgtttggaaactaaagatgctcagaaaggattatttttggacctcagcctagataaggaggcccactgcaaggtttatacaggagcctagaagataaatttgctccaattaacccaacagctaaataaataccaatattagagaaaacagtaataaaatggctatttggagcaattactacctatgccaagcagaaatgtggattcaaaacagaatttgtagttttaaactatatttttcattttagtttagggttttgttttctggtttccaaaaatgtcatatcgtatccaaagcctagtgtttttcttttctcggcttgcaaagctgcaagtaaaaacacaaatcatatggcttgcaacagcctctaagccatcttcaaaactgaggcgccatgggcaaggagaagtgctatttaaatcacctaaaacccatctgcggtattttctactcccaacctctctgcagaatgaaagaggcaccgagcctctcagagccttcaatcacaccatctaggagggcagataaatgcctctaaaattccctttcattttatgaacagagacttcctcagttaagagacctttccatcgttttgcttccctccttttcaaagggctgaattttaatgcaaatctaattactcacttgatcagggcaggcagatgctgtgcagatccctccattccctgctaccacatgtcaatgctgacctgaaacccccctcctttccaatcgcaggcctcccaaagcaaaacccaggctgctggtgcttcaggcagtactggctggacccagcaacacagccatcaatggtgcacacagagaccacaactacacccacccctaagggtaagctccttcttttcagtttttacttaaaattggatttcaacccaagtgttaaccctttacatgcctaaggaacactgctctggggagagctggcctgatttcaatgatgtctagcaccatctagtggtcacagatttaaatgacaccaggcttctaaagaagttgttagtagggttttttgccgggagtcagaaaacgttcaaggagtgaaaaataaaatggatcaaatctaaatgacttaatatttcccctacctaaaataactcaaaagcagaaacttctactagcagaacaaaattatatttgcataatttagggcaatattttaccaattgccctcccatatttgacaggcagaaaagaatatggtaacatcagttcaaagctattaactttagaactgtaattttaacttattctcctaaaatcaagcatctgttaataaaaatattataaatataaattgcatagaagaaatatgaaatttcttttaatatgtgaaactttctcaatcgaaatgttcaatttattttcatgtctcagaacatgtagatatattacttttacattattaaaatcgtttgacattttaaaggatttagaaagtagaaaatttaattcgttggtcagtcactcaacctacaaatgtaagttagctgaaacaccatgcacaatctttaatgctcttctggtcataggaaacacaaaactcaaaatatcgttttgttatggtttgggactaatagcattaatctgaagaaagaagagtctagtcattttaatctttaaatgtattttctcttttcataataaatcaagaatataatacttttatttaatcccaaacacacaatttaagcaagggaacagtaaggctcagaaggacatccacaaacccagaagggatgagaagctgattcacactagatgctggggtgacaggcagctggcaagcactggcttacctggatgaggaggtgatgtgtgggccacctgtcaatagtgctccacttcatcgtgggcttccgtcccacttgattatagtatctgtaaatggcatttaagctgctgcctgaaatatacagagaccacttagtagatgcattttgattatggtgaaaataaaaaacagactcgtaaaggtagtatatataagttcaaagcaggtaactgcttctttactgaatcagtctaattacaatcatttcaatactctaaaatgcatatagatttaactaccctgcaaatgaagatcactaaaaagcaatcaatttcaatggactttcaaagattattgatgtcagttctagtgaaaaacaagatggccgtaaagttatgaaatataagcagtcatatttacagggaccaagtcttacaattcaaagtatgtcggccaggcacggtggctcacgcctgtaatcccagcactttgggaggccaaggctggtggatcacctgaggttgggagtttgacaccagcctgaccaacgtggagaaaccctatctctactaaaaaatacaaaattagccaggcatggtggtgcacctgtaatcccagctactcaggaggctgaggtaggagaatcgcttgaacccaggaggtggaggttatggtgagctgagatcgtgccattgcactccagcctgggcaacaagagcgaaactccgtcccaaaaaaaaaaaaaaaaaaaaaaaagtatgttattttttttccagttacaaaggttatcaatcccattataggaaatgtatgcgatggggaagaaaggaaaaaagaaactgaccattatcccagcatgctaattacagtcattgctttactctaatatggttctttttttctttatagatgttttgttttacaaagttgtaatttttaatacatatgcaattctgcatgctgagtattttgagcatctttacttaatattatgaaataaatattttccatgttatgataaaagctttgtaactattgtttgtttgtgagatggagttttgctcttgttgcccaggctggagtgcagtggcgcgatctcagcttaccgcaacctccaactcttgggttcaagtgattctcctgcctcagcctcccaagtagctgggattacaggtatatgccactacgcctggctaattttttacttttagtagagacggggtttctccatgttggtcaggctggtctcaaactcccaacctcaggtgatctgcccgcctgggcctcccaaagtgctgggattacaggggtgagccaccgcgcccagcataactattgttattaatggcctcatgataaggagagaaaattattgaagtttctgtgagttctcattccctagaataagctaaatggacaccaaatccttataagtaatctaataaacttatatttctaagagagagatggaaatcatgaaaactcaaagcctaaaggaaggcagatggtgtcaacccaatgtaactttttcctgtctaggggagttagcattggggtcacacctgaatcctatgaaaccaagtctaacacacagcctcttcctcagtcttaacatagggcaagtcccaaaacatttccatgctttccatcaccgatccactgggctctctaactataagaactattagttaggtttccagttgaaaatggtagtcaggagagagcatatcttaaatcacatatactctcagactaagactcaacttccaaaaagataaacaggttcaattttggtgagtagaatacagtgaatcagaagaattcaaagggactccattcaaggttcagaaacaatctctccagaaatcaaaaagttgtcacgaccatattcacgttacagaccgcacttcacaggtggatatcattttcatatgtgcaagggggcatctggaagctacattagctctttcaggttgtgtggaaacattcaacaaacaacccaaagaagtcattaaggagaaaatgtgactgagaaatgtgtttgtgataaagacacacactggctctgccacaatagtgccagtctaaaagatacaacagataaacagcatttgagtggcctcgaagaattaacgtacttcgcaaagccttccacaacttggatagacggatgtacctgtccttacatgagatacattcaagaaaaactaagcatacagtgaagttttgcatacactgtcacttggtagagccagccctgaaataaaaaccatagtcaatcttctgtcatgtaaataacaatcttcttaatttatctaattgtgagagcagccatttacatattgaggtatatttcttaaaacaaggcaaaagtagagcttaaaaattcataaaatctgactccttctccagtaacatatgaccagacattttgaagttgtagtggtgcatttccaaaagaaaaataataattcaggctgagtgcggtggctcacgcctgtaatcccagtgctttaggaggctgaggtgggtggatcatttgcggccaggattttgagaccagcctggccaacatggtgaaaccccatctctaccaaaaatacacaaattagccgagcgtggtggcacatgcctgcaatcccagctactcaggaggctgaggcaggagaatcacttgaacccgggagatggaggttgcaatgacagagcaagataccatctcagaaaaaaaaaaaaaaagaaagaaatgataattcaaactcttgagggtatcttagaactcaggcattttaatgggttctctgaacaaatatttaaggcacataacaagctttgactttttccaatagccttttgattctccttatggttatagaagtgataaacattaatatccaaaagcaatttgggactaagaatgtgctgacttcaatccttgcaatggaatgcaaacaaatgtgtctgtgggtgacagtagcagctttgcctacaatgaatgatacagagattgccaaacaccaattattccccagctccagttaaatatacagaaaacgacaagcagtaacattttccaaaatcaagaaaacagaaaattctgcaaagggaaccccaaactgggctttagttttaccagcaaccaactcataactgaagcaaaacaacgacaacagcaacaaaatatcagtatttcccatgttgtatgggcatctttgctttcaaaatgagaacagttacaatctttgctacatcagtaagaaaatctgggtagccataaaaaggtttatcacacaaacccagaaagagccttaaggttcattactgatccattacacaatggcattaaagcactgaacactgacagccactgcctaccacccacaccatttgtaattaccagccaagtggccaataattcaagggacagatggaccatgagatttcaaatggactgacctgaactctcgtgtttaaagaagacaggttgaatttgccattcaaattgcaaataattcatccttcccttcagtacttagactccttggttatttttgccagcaccgtatctacctttccactgtcagagagatgcccttacctgtggtggagcagctgtactgtggatactgtgtgaaagcaatagccctttctaggccatctctctccatctcttcaattgcttcttctgttaaaggatggacgtaccgaaatccaatatagtatttgtgaggggctattaggaagcacatgtggaaaggagaaagtgttaatccttatatagattcctcagagtcaacaaacataatgcaatgcccagaacaaagaacagttcatgtaatttcctatggcactgacggtgaaggcaagtttagcatattccttggatcttatccactcttcagctggtatgtgaacttttaatgatgactttctaggatcagtaccccacccacacacctttactgcacagtggtttttaaaactcaaacttctcttcctaattctctgttcttggctggcataagagagcctcaagagaaaggaggaaaaaacaacacttattctaaaatataacttcctcttgcataccagatactatggtagccactgggcattatttttttaatcatttaaacctgattttccagataaggaaacagagactctgaaggttaactgaactacccaaagtcataccttgcaggtggtcgagctggaattagagcctgggtctcccaacccatgcttctcactcctcccaggccccccacctcaccctgctcctattacccagttccccgaacccccaggccacctcgtttatataaaaaaatgcaagagctcttgcatacgtaaaaaaattcattgataacaaatgattaaaatgattctcctcattacacatataaaacagtgcttactttggaggtgccacatgggattgaaagccattgttcttggtacctaaatggcccatgcctgctgtatatcctcatgttctttccctgtcccttccctgtcctttcacgaataccctcttctatcttctttatcctcccgcatcttcctttcttgtagttcaaaaacatccacaccacataattgtttaagcatgtataaagtcataaaactacaagtttcctaaacttacttagtcttgtttccttgccttttcataggattacacataacttacactcagggatgatagtgagaatcactacatgagtgtcaggtaataaataataagaccatgataatgttactgtccaaagcattagcaggggctgcaactatgaatgtgacataaattgccacaagaaacatttaggttaaagtgaaggaaaagacgggagtttatctcatttatacctagatatatacaaggacgacattcctcctaacttgacccagagagctaagagccaggggaacacattcccaagggagaagcagaatgccattaggcgagagaagcacatgtgtgcacagaaaggctggtcggactcagtattctctggttgggtactgcaaaaaagaagaaggaagtaaaactagatcatttttagcgctctgtccattttccggccaccaatttcgtgctgccttgcataaaatggtcactagcagttaaaacatatcacaggacatgatcccataagcaaactccaaatgactgattgttcaaagattatgtgctttgtgctaaaaaccgccaactattacaataccatcaaatcccttgaagcaactcttggtgatttgagctgaggtttagcaagcaagtagaaactgctttcgattctactttgaaacaatacgatgatcagaatgacatccccagtgctgcaggtcaaccggcttctcgcattttcttttcacctgtccagtatctgaaggttacggtctaaatgcctagggtctgggagttcctcaaatcatgcatactaagaggtagaaaggctgcccttgcagataaagacaagggcaggtggccacattttaaagtgagacagagtaaaataccctggaaagaactgataatgttttctaaatgctttctaaagacaacctgtaaacacatattggagaaaaagcagcaaggtactctccaactgggcatatcctgaggaaccaacaaacagtgttcatgaaggacccgtgtccatcagggtgggtttcacaatgcagctggctgtccctggaaggatgcagggatgagaaggagcctctccgatgttaaccagtgccacatctcgtgggcagatctggccagagtgagcccaaaacacatcactcactggcctagcttacgtaccctcagagcagctgttcaatgaacagtcttcagcaagaactactaaaagacagagaaactagatttttaaacagcaaaaacttcattaatttagcatgtacaatagttcaaatgtccgatttgtacatgattttttgaaagaaaagtttgaaatatgtagcaaatgcttactttgtatcagatcatgaaccctgtgccaatgatgaattaaaaagctcacgtatattgaacttttgtcatgttaatgcctctcaggattatcgcatttaattttcacaaggatctaagagttgagttctgttaccatccccattttctagctgaggcttagttaagtaagtaaactgcctgaaccagagcagggaagccaacaccatcagagaaaggaacccatacgcctatccacgctgcatccgggaaagaacagaattatttcatgagcatcccttacttatagcttcactaaaagcagttacaagctaaacagttaaactataatttgcaaagcatatttgagatttagactttccatcacatgattacacttctcatctatttctgtatctattctctacatttctgcaatgcaatgtaactacatgaaaccatttcctgatataactcactgtcttagttaactggtcaattctatgaaaccagtgcaagtctcaaaacgtccacactggctaccaagcaacaaccacttccctaaaaaacgacagcatgaaacatgtttatctgtttgcaatcatcacattttctggcctaaagagaatttttcttaatagaaataaatcaatagacatagttcaaaagtaaactttacaactatataggaaagaaaggatcagaagggaagaggaatgagaaggagatgaagaggtaccccagcagcctcaccggagacaggaggtggcgggaaggatgccctcctgtctgtattgctttttcaagtctgacaactctaccagggctttaactcctgggctcaagcaatccttctgcttcagcctcccaaactgctggggtgtgccccacccccatgctcactagggctctttataatgatgggtactacagtaacataaaaacaggaaaaatgggaacctttctgcctcctcttcccacgagagacagcatagcaattgcaaatctggttcataataaaaccttttttttttttttgagacagggtctcactttgtttcccaggctggaatgcaatggcatgatcatggctcactgcagcttcaacctccctggctcaagcgatccttccacctcagcctcacaaatagctgggcctacaggcgtgtgccaccatgtctgactagttgttgttgctgttgttgttgttgttgttgtcgtgtgtgtgtgtgtgtgtgtgtgtgtgtgtgtgtgtgtgtgtgtgtagacagagtttcaccatgttgctcaggctggtctcaaactcctgggctcaagcgatccacctgccttggcctcccaaagtgctgggattacaggcgtgagccaccacaccaggcccacaagaaacctctgatcatgataaactgttaatgactggagtttgttctctagtaagtaggtgtgaatggagggctgacattttaaagatgcactgtggcatgcacggaggaactgcataagaaatgcccttgagccacagctttaagcaggaagcaagccgaatatgcagaagcacagttgaacaattttcgaagtgaggtgatctgagaaggggccagggccctttgttactttgtgccatgggaaccagtggattctgagaacagctggagtggatgcttgctcagtgatgtcagaaaagagtgaaatgctccttttggtcctgcctagtggagctgttctccctgagggttcccagtgtcacacacctatcctgatcccaaagctctaagatatatttgcaatgaatgtaattcatgtgtcctaagatgtacatttttttggttttaacatttctcatatcagttcagtctacaatagatgttgtcttaaaattaaccggtagtgcttttgtatcttagtattatacaaaaacagggtgtcctgcaatgaattgtgtcttcgatgtgtttaatacagcatttttacttcatccatgcatttagtggttcattctgcacactattattctggatagaggttctcagatgtgcacaatcctctttttggtgccacgtccaacaaggaccttcaataccttacaatggtgatattctgagagctgaaagcatcactgcgagttgcttactgtcctgtggcttccatgatagctagctaatactgctctaaatattctaatcagctatccaaccagaaagaaaaggcaataatagcagcagcctcaatccatttcccaaagatttctttccagtgtaatgatatatgcatctttctttcatggtatgttgcttatgccttatactctagcaatttaacaaacatctcgaacttccttttgaaactcatgtcccaaatccttagcttttttttacttgtaatgtaagaagtcatagcaaaggctaaaggtcaagggataacgcctggagacctaaattaagtgaccatgtattatgtagaaacaccacaaattgagttgccagtacatatgaagcatttagcatctactactcttttgaatttcataactacttcgaaagaactaatctagttacatgttaatgaagaaacaccatacctgtgttgggggacaattcatccagcagcttcaccatgccctctccctgcttggaagtccatatcttgatgggggatccgcctccaatcctgcggtactgctcttgaatcttgggggttcggcgtttggcgatgaatggtgccagcttactaaatcatttaacatacaggtaagtggattttattccagcttagcaacctgagaaatgttttctactcaataaaaaagaaaaaaagcaaaattttagagagcctaacaagattaagcctttaaaacagaagcttgaggtcattgacaatagccagctctcttgttgtagaataaggagctaaagctataccctctctgaggaatacccagctgtgctccacaagctgttccagcagcacacctgaagattcaggacacacaacacccatgcagagaaacctggatgtgcgctagctactagcgtaacacattttgatcccacacctaacgagaactaggatataagacaaatgaagtagacatttctcttaatttaaaaaataaagtctattaatcttatagatacacttgcatataggagcaaagatgtatgcacaagaatgttcactgcaacactgtaaacaaactaattgtccaccatgaagcatggattaaacaaattaagttacagccatatgatgcagttctaaatagtaatcaaaaaatgagccagacctatatatcgatataacgttatgaaacaagatacagtgttaagtttacacattcacaacagcaaagacttggaaccaacccaaatgtccatcaatgatagactggattaagaaaatgtggaatactaatgcagccataaaaagggatgagttcatgtcctttgtagggacatggatgaagctggaaaccaccattctcagcaaactatcacaaggacaaaaaaccaaacaccgcatgttctcactcataggtgggaattgaacaatgagaacacttggacacaggaaggggaacatcacacaccagggcctatcgtggagtggggggagaggggagggatagcattaggagatatacctaatgtaaatgacgagttaatgggtgcagcacaccaacatggcacatgtatacgtatgtaaaaaaaaaaaaaaaaaaaaaaaaggaaagtttcaaatatagtacataagtaccttcacatttgtgtaacgaagtgggggggggggtgtgcatgtgtgtatgtatgtatgtgcgcgtgtgtgtgtgtatgtatgtgtatgcttggatatgcacggactatttctggatgtaacagcgctttcctccaggtggataactgggagtgcaaggtgaaagggacacttgccttttactgtaattacttttatactatttgtagtttttatcccatgcatgtactaatttttcataatagaaatctattttgaaagaaaaaggagagaaggaagaagggaaagaaggatgaaaggaaaagaagggcagcaacaatccatatttatagtacaaatgaataataatcattgcttccctgagtgttaatcagccgttaagtgacaagtacaaatatatctttaaaaatctttaaaggtacctaggctatgtcaagacaactgcaatttccagggctctggggagcaaagggctcaaggagaatccccactaacttatttgctctctccccctgcaattttctgatatcatatccttctgatatccaacagaaaacaatgctgctgtttaaccattaccagatacgcattaaaactatttactggtttgaaactacagaattgagagacacatgtcaatgtagtgccaaggttataattgaggtgtttatatatatctcacttctgaataggaagtgtcatgaggtctcggtccaagaagagtctcagaaggaagtcgtgaacatctccaagagtttcagggcctcccatgtttagcattaatattccagttttcggcttcctatataaaataaaatacaacggttgatttgtcacacttcttattttcttccagggtggactcttggttcagccagcaaactctaatctgttccatacaaaggtaaatactatggctcttttcactgccgtcacacagatacctattcggggacatctgtggcctccagttccccatggtcccagctcagacttggacctttgtcttttggcttaattcatgatatcagtcttcactccgctagaaatgtttcccttttaaagtctcggcctgaagagagatcgaacctttagggactgggagtcaaggtagaaatctaaaattgtcctgcagctaaagcacctgtacatgtgagtaccatatgaatacagaggttacctgacctctcccaacttcaagtttcctcatctggaaaacatagcacccaccacctactcaaaatgctgttttgagaattcagtgggtaacatcttcagtcacttagcacgtgctggcacatggtaagttctactctacacagagcagggttcccccaaaattttaaacctccacagtctaataccagcccatccccactcttgcatctgctcctgtctctttagtcaattattaaattaaatgactactgactgaaattagtttttacattttatttttgaaatggattctcactctgtcacccaggctggagtgcagtggtgcaatctcagctcgctgcaacctccgccttccaggtttaagcaattctcctgcctcggcctcccaagtagctgggattacacgcacccaggctaatttttgtatttttagtagagatggtgtttcgccatgttggccaggctggtctcaaaatcctgacgtcaggagcctgcctcggcctcccaaagtgctgggattacaggtgtgagccaccacaccaggactgacttaagttattgcttgctcctctgcttccttctccaagacctccctctattccttcatccatggctcctgttatgataaacttctcctctccatcctgcatgtaaattcactgtgtagataattcctgcaagaaccggtgctaacattcaaattagtcccaggctacagaatcaacccctgaataagcaggaagaagcaaaaagaaagcagagctccataacaagttttaggtcaagcagcttctggaaacttaaaaaaacaaagtgctatgcaaaaatgtaaacctaaaatccagatcaagctccggagtcaacacagcccaaagtgagccaggccaggagctccccactcctaagccccgccagagggcaaggtgaagtcggagcaggaccaggtgcctctggcacgctggcaggagccaccagaagaccttgcgtgtccccatgagcaggtagccatgggatggcaataactggggaactaaagatcaaggagcatttcttccattcattcattcatctttttttcatatttaaaaattgagatataactcacataccacaaaattcaccataatctgaacaattcagaggtttctaatacataaggaaaggcaggaaaccatcacgactatctaactccaggacatctttaccccacaaagaatcttcgtatccattaaagccactccctgttccctcccctctcacccctggcaaccagtaatctactttctgggtctatagatttgcctattcaggacacttcatagaaatggaatcacatgattgtgtctggttttactcagcataaaatgttcatgattgtgtctggttttactcagcataaaatgttcatgctacgtgtcgtagcatgaatcagtacacttcactcctctttattgctaaataatatttcattatatggttataccctctattcactttcaataaagcagctgaaaaataaccagcctgaagtttatctaaacaccgttattatgaacgctgaggggtctacttcctgaatctcctacaccagactacctctgaccactgcagtgactaaaccaatgctgctgagacagagcctgtatagagaaacattctttatgtgctcgaaaactaaagatactatgatgacatcttttttgtttttgtttttttttgagacagggtctcactctgtcacccaggctggagtgcagttgcacaaacaaagctcactgcatcctcgacctcccgggctcaagtgatcctcccgcttcggcctcctgagtagctgggaccacaggcacatgcctccatgcctggctacttttaaaattttttatatagacagagtctcgccatgtggccccgactggtctcaaactcctggctcaggctcccaaagtgctgagattacaggtgtgagccattgccccaggcttatggtgacatcttaatgggcaatttttaaacaattattaacaacatttggcaataacgtaaggcagcagggtatgtcaaatgtaaacaggtagaaactgttttcttgatcaaacctgttgtataagtggatgaggtaaaaatctgaattctcaacctactttttcagaatacgaatcaattcctggggaaggagaaatatggcattacaatgagatcagggattttctcatttagaccccattataaagattaactaaggtcccttttcacatcaatgccttcaaccggggtttttcaacctcagcactactgacgtttggggctggagagtcctttgttgtagaggacggccctgtgcaatgcaggagccttggcagcatacctggcctctacctgtacacaataatagcacacaccccaccccagtgtgacaaccaaaaatgtctccagccattgccaaatttgtcccaggaggcaaaaatgcccccttccccctattgagaatcactgtcttagagaaagagggcttaatccccttctaaaacaaccaagcaactgcactgaagatgtggttgttatataactcttccatgctcgagtcctacaactgcattaacgggtgtgttgagttttctttccttgatatttgaaaattccagatgcattattttgtgaaactaatattcgtttaatctttctacttagaccactagtcttctcctgggatcctgtctttcaccttcaaaatctgtgactcacaataaattaagtgcattttcccatggattgctgccagttaacagattactggttaaaaaaacctcaggctaaaagacttacctaagccacagacggtatcagtgtgcaaacgggatttagagctgtttttcatctataacacctgagctcagaacaagagtggctttaaaggggatgctactctgccctgctcatggttttgcaaacgcatgttgatcttacacatgaaagagatgcacacgacttgaaaatacctaaatacacatgcacttaattcaaaactgtgttgtgcatgatgaatagcgcattagtaagccccagtctgacacccctctattccagaatgtgaagtgaaagctttagtcaagggtctccatctcctctccctccagacagaacacacctgagaccaaggtctgaacgttcatgttccgtttgtttgaatataaaagtgtatacagcaaaatatatttaaaacttctcacttggaaaggtttcaacattttgccatttttatatcccaggactctcaaaatacaaggtttttccgtgaaatattaaatgtacgtaacagaaacttaagcttgtcaattaataaacaataattctattctactctatatggtcagcctcaagaaaaagtaatacgatcccagctcttcattaaacctctaagacatgattggcctgtgggtctatgatgcctctagaacagaatttggtgaactatagcccatgcactaaatctgtatacacacatacacccctactgcctgtttttgtaaataaagttttactggaacacagctcccctcattgtttatgtaatatctatggctgctctcacactacaacagcggagttgaatagcagcaaaagacagagtttggcctacaaagcctgaaaaatttactacctaaccctttacagaactaatgtcaacccctggcctagtgtagtgtctactctagtattgcagtctagtccagcccaagcattaagcagcacaatgccttcataatgactgccatcagaagaatccacaaagacactcactgcttcaccatttctaatattaaaaaactagaaatcacctacgtgtcccagaatgttggtcaaggtagtttatgacttaataaaatactcttcagttactaaaataatatagacaagtatttatgatgataaagtaaataaaaagagggcattataaatatatgatgtacagtacggtcacatcttgctaaatacatacagagtgaatatttaatagtcatacagacaaaattggcctggctggtcgctcacacctgtaatcccagcactctgggaggttgaggcaggaggactgcttgaccccaagagttcaagacaagcctgagcaacacagtaagacctcgtctctattttttttttaagaagacagagagagacaaaatattgggtggtaagattattcataatgttttaaggttttttttgttgcctatccgtattctctaaaatgatcccatttattttatataaatatgatctaaagttacttagtagaatttaaagactttcatttaattttaataatattaagcctacttatattaatgagttgctgctagaaaaacacacaaatgaaataatttttcttctaggattccaaactgaatcagttcttcagtttctatcaaatcccaaccctcagtgcatatggctgaggtggggagaggggctgggaggggcaaggagaaatggaatgggccctgcttggcaggctgccagatgaagaaggtatctaatgcccatccccaactaacctcaggttacacagcactcagtcatcatacccatgatcatatagcaaaaaacaataaacacacaataagaaaattttggttctggccaggcacggtggctcgtggctcatggctcatgcctgtaataccagcactttgggaagccatggcagaactgctggaagccaagagttcaaaaccagcctcggcagcaaaatgagacccccatctttacaagaaaaaaaatttgttttaattagctgggtgtggtggtgtgcacctgtagtcctagctacttgggaggctgagacaggaggatcacttaagcccaggagttcaaggatgcagtgagccatgatcacaccaccgcactccagcctgggtgacagagctacactcctcaaaataaaaacggtggctcacgcctgtaatctcagcactttgggaggccaaggtgggtggatcacttgaagtcaggagttcgagaccagcctggccaacatggtgaaaccccatctctactaaaaatgcaaaatcagctgggtgtggtggcatgcacctgtaatcccagttacttgggaggctgaggcaggagaatggcttgaacttgggaggtgtaggttgcagtgagccaagatcaagtcactgcactccagcctgggtgaaagagcaagactccctctcaaaaaaaaaataaaattacaggctcatgcctgtaatcccagcactttggaaggccaaggcgggcggatcacttgaagtcaggagtttgagaccagcctggctaacatagtgaattcccgtctctactaaaaatacaaaaattagccaggcgtggtggtatgtgcctgtaatcccagctactcgggaggctgagacatgagaattgcttgaacccgggaggtggaggctgcagtgagctgagattgtgccaccacactccagcctgagagacagagtgagactctctcaaaaaaaaaaaaaagatatatatatatatgtgtgtgtgtatatatgtgtgtgtgtgtgtgtgtgtgtgtatatattcatacctgtataattttcatcaaacaatgtgtgatctagcagaaaggtcatggagttaaataggtcccagctactttctctcactctgcctgatgttaaagggtgctgtttctatgtactcatctcgataacttccctttatagagtcttctgttgcctctgtacagaggaagacttgggagcggttgtgactcctgttactaaagaggacccttgcaacaatgccatgcctgctgccagccaccagcaacagaagaggtgaggtatgaaacgtgtacttcacttctttaatagatgataaatcctgttacttcttttataattacgttcactgtgttaagggatgaaaaacaatactctagcttcctatagaaattcttggtagaccagttattcgttatcctgtacagaacatacatttcataggcataattatgttaggttcgtaaatacatttccagcatatataatttgtgttatgtgacatattccagaaccaaattcttaacacaatttgcagactgtttgtactcaactctgtgtcttttaacaatagccctgttgcagggaaggatccagtggggaaggagggtgtaaaatctatggtttaacagctattgaaaggaagccaagaaaatagctccttccacactggcttttcccagcacctttcctcccaggcagcttgtgtctattggtgtctgcatcgataaagagaaattcttatttgtacctgatgttagactcatacctcttctgcggttgaacttgaggttttgcaccctgggcatgctgggctgtttctgtggtgacggccgctgcagctgcacctgacttccacctccatggctgacagaccctccagctgctggatgccactgtgacaaaattaaagtgctcgcatgaaatctagctagaaagtaatttcttctgaagaggtcctcagagcataattcctgactttaaaatttaaagagatcccatggcagaaatgattttcctagcatttctctgcaggcaggtaaaggaacttaagccctctccaaggggatggggtggaggatcgctcccctaggatggccgatgagagcctgcagagaagcattttagaaactacacacacctcctctccccacctcggctgcagattttgatacaatccctcacaagaacccctgcacgagaccaacatgactgacagtagcgtgctgctcctgtggaaggagaaggggctgcagaaaagtgaaaagccgccgatttcgggagtggcgagtgggccagtttccaaatagctgcagttctcctttctgcctccaagccttcttcggaaagcactcgtgctgagaacccagtactgcccttgaaccttgacaaggggcctctgcttcccagggcctgttctggccctcctcccactgcaccccaccccacggggtatgcagtctctaccaccaaggagacatgccaccccaggagtccacatcccacgtgccagaccaggctcccagcgccccaggattccctgtcccccaagctccacacccactcccagggtctgtgcaggcattttttcagatccatcctcctgagggaggttgtgccatcagtggatcaagtcttgacctgaatggtggccaagggatagatagctgtttgcaggggcaagagtggaactgggcatgaagaccagagagtccatccaggctgtctgtgaggctccccacaaggccagaaagagccagcggcaagaagagaagcaggaaagcatgtcagtcagaggcaactctccaaaggcctctacacttctgcaggaactcagagagttcaagagctcatccttccaggttgtgatcaaggtctatttgtcaacataggaggacagaacatatttcccagtttgttagcttgctatatcccacataccatatatgtgccttcaagtatacccttgtcctgggccccacaggaggtggcagtgggtctgaagaacccacctgaattgaggagatcatgtgccatactcagctgtcatatgaagagtactggtccttaaacagccagtgaaatgaaactgaagccatataggaagtactgaagatggccatgtgagacggtggttactgtggtgcctggtgctatgcacatgacctcttccccattctcaaaccagccggttagaaaccagcttgcgatcagtctccttctgccctcctcctcctaagaggcaaaggtgccctgaggaggaattcaggctgtgggttaagcagctctgactctgaattcagctctgccacttactagcaatgtgacctggggccaggtcttcctgagcctgagtttccccacctgtaaaatgacaccttgctacagggattcttgaaaggagtagagcagaggagtgaagcgttctgcagtgtccaccatgtgattagtactggtgttagtttcaattgtcagtttctagaggacgggaactatacctgctctgattttatcacctagcatgtctgtaaaatataagagaattatatctccaggccattagatttccaaccacccagattgtacacattcctagcacagccaatcatgtcagcttatgctgaataatctttaccaactcaaagtggaagtgcaaagattccataaagaagttcaattccatctggtttgagttggtgttttaaaaaaaaaaaaattcaattccaaggctcaaaccaactcacatctccttttttactaagtttaattctgaacttcatcgtgggatttaaccaggttcctaatcatgctgcaatggccctaattccttatgagtgagattgtatcggattccatggggcatgagaatgaaaccttggcattccacagtttgactgctggtacaagtttagcatcccaaatgtgaaaatccaaaatccaaaatgctccaaaacctgaaactttttgagcactgacatgacactcaaagaaaatgctcattggagcattttgaattttagattttcagatttggaatgctcaatctgtaagtaagtatattccaaaacctaaaaaaaatctgtccaaaacacctctggtcccaagcattcaggataaggggtactcaacctgtaataaaatgacatttcctccttcaaacctaaaaaaaggaaggagtgccaggtgtggtggctcacacctgtaatcccagcactttgggaggcagaggtgggaggatcgcttgagcccagacatttgggggcagcctgggcaacatagcaagaccctcgtttctacacaaaatttaaggagttaaaaaaaaaagaaaggccgggcgcggtggttcatgcctgtaatcccagcactttgggaggccgaggcgggtggatcacgaggtcaggagatcaagaccatcctggctaacacggtgaaaccccatctctactaaaaatacaaaaaaaaaaaaaaaattagccaggcgtggtggcgggtgcctgtagttccaggctgagacaggagaatgacatgaacccgggaggtggagcttgcagtgagacgagatcacaccactgcactccagcctgggtgacagagtgagactccatctcaaaaaaaaaaaagaagaaggaagcggtggggagggactagattttccaactagtagatgaggatttcctaataaatttgggagctagtagcttttcaagctgcttaactattaccatgtcttacttacaaaattattttctccatggttcaccagattctcagagaggagaatgatgtcgctgccaagggaccctttccactcaggttcgttaatacactcacccttcaaggactcatccaaaacactcctctcccctaatgatctgaagattctagaaaaatgaaaagcgtctcctaccaaacaattagcattcgtccaggctaaaggagtttaaagtaaacattcaaagggccaactgagactctggaaaagactcagctcacagctgaagagaatctgatggcacgggcagcattgcgtggcgtagagagtacgtgttcggaaaccagagagatctgagcagaaatcccacacgggaccaagaggctgtatggctgggcctgggccactcactgagatgctgcgagtctcacttttctcatctgcaaaatagtgataaggctacttctgcagggctgctgtgaagataagaggggaaaaatatgtccagccccaagagcaatgccttgcacactgcatgtggctgagcaaaggggtgaagaatatccaatagtatagacttgcccatttatgaactaagaccaagtaattctgcccctcctccttacatggataactgatctacctttagaaggcctacaaacaggccgggcatgggggctcacgcctgtaattccagcactttgggaggccgaggcgggagaactgcttgggcccaggagtttgagactagcctaggccatgtggagagaccctatctctattttgtttaattaaaaagaaaaaaagaaggcctacaaacaataaaaatgatcaaaccgacagataagcagcaaaacagaagatgacataagaaaacgaaacttcaccgggcacagtggctcatgcctgtaatcctagcactttgggaggccgaggcgggcagatcacaggtcaggagatagagatcatcctggctaacacagtgaaacccatctctactaaaaacacaaaaaaattagccgggtgtggtggcacctgcctgtagtcccagctacttgggaggctgaggcaggataatcccttgaacctgggaggcggaggttgcagtgagccgagatcatgccactgcactccagcctgtcgacagagcgagactccgtctcaaaaaaaaaaaaaaaagaaaacaaaacttcataactcctgcagtggtggacacctgtagtcccaactacttggaagactgaggcaggaggctcacttgagctcaggagttcaagaccagcctaggcaacagagtgagactcggtctcaaaaaaaaaaaaaaaaaaaactctcaaaaaacaaacttcataattcctggacaaatccaataggtgatcattcagaagtatacctatgacttaagaagttcctaagttatgacttcatgttgttgcaaaaagaaataaagaaaaaggaaaaacagaaaaaaaagttcttaagtatcaactggttcttcaaaaccaaattaatattttggatccttgtgggcgaggcagaagagggtggggggcgagatacacaagtattgaaatctataatggcacttttctatcacataggagatgaggattacttcaaaagtacttataaaatatgcaccgtttttaaaattaacaaaagaaataaggttctatattataactattaataaacatagtgggtgcttcaaaatattggttagttgctgatatggagccaaaatgttctaatgtctcttatgtaaaccctacaactcttttattatcctagaattgtttttctaattacataagacaatatatgctcagtgaaaaaaaatgtttggggggccaggcacactagatcatgcctgtaatcccagctaccagggaggctgaggcgggaggatcacttgatcccaggatttcaaggctgcagtgaactatgatggcaccaccgtacaccagcctgagcgacagagcaacactccatctcttaaaaaaacaaaagaaacaaaacgtttaaagtttggaaagaaaaaggcaccaagaaaaaaaataattcatatagatagctaaacagacagataatatatggcccacccccggaagcttcttattaattctgtaatatgctaaatacataaagtataaaactttgcttttccacttttactttcagaactcattttcggaaataatcctcagtgttttctcacacagaagttgatcttttcctatcaaccaaaatgatgaagtattataactatgccttcaaatcaaagtctgtaacacaaataagactccaaatctacttctgctagcgtttctgaatctttccacttttaacctagactacaaataatttaaagtttcacatattgttccacgacctcaaatctaggacctgtcagactttatttgccacaggaaaggtcagtgaaagaaaagattagttcaatacttctttcagccccacgactggcactgtgctgcctcttcttaaaaaacaatgccctttgtcccccagcgcccttagtgagctagcctcattgtacactgggtccttagtattttcctaacaaaggcacgtctaatgagatatggaggttcagaggggattccctccactccaagtaggtgtcagactgacgaacgtcttagaaaaatatgtccggtctgtgtccagtcaccgttcggatgcattgaataagcatcttattcgtggcagccttctgcatgaatggctagacatcttgaggatgcctgtgtactactgtgtgccaggcaaggtgctcatgttcaaggcaagccttaaaaaaaaaattaggatttcaatgtacatttaccaaagctctggcgaggttaggtgccttgttcaaggtgtcacagttggaaatgctgtcccagccaggtgtgtgagatccacagtcccatcagctcatcctgtggtcacaacctattcacggtttgcatcagaaacgtgggaggctgttcctgggtcttacaagttccccagatatctctagaaaacgctagcccaggctgccccacggggggtcccgctgctaaggagaagtgggcacagagggaccaaggaccatgggctttcctcagcagggagggaactgcagggcagatgtccatggtggtgatgatgaagatgccttccttactatcctctatggcaggcccataacataccttccctcgcgtaatcttctcaacagcctggttattgcaggtgacaataaccaaggctctgggaaattccagccactgctccaagccacccagccgaccgatgggacttgaacctgcgcctcctggatccgggcgccctccccgcggcctcccgagccctgagtgctgccctcagccctcccttctccgcgacgcccctcgcccggttgctcgcagcacccccaaggccgctccccgaatcccccgggcgcgagggcccgggcgccagctgcccgctctgcccacgccttctcagggatcctggccctggcggccgccgcgacagacccacttacgcggatcgcggagcaggacgcccgcggcgcgcagggccgcagccatgtttgcgccgagtgaacgcattgcctgggcagcctcggcccgagtccgggctcctcccgcggcggcgcgcccaggtgtccgcccagcagtggccgagccgggtagcgatccccacgcgcgtccccagccccctgacctcgcgccctcccggcgcgcccgctcattcgctgccgggccggggcgggcgaggccaggcagagacacgcccctcgcggagagcccgccccagctgggcgccgctccctgcgtgaaaatgggcccgggggctgagctagaagcccgctccccaccaccatcgcaggtcactgcaaaacctgctggactcctagttgcgtgccctgtttgcatctgccaaactagcgaagtcaggatcctcagccatgactcagcaaataacttttttcgacgtttccattactattatttagatataaggatgcttttgcctcagttctccagtttgcctgcctagtcacaacacaagtgtgcagatcctgttttgttttgctttattttcagaatagaaaaagggattattcagtttctctgcaccctctctgtgtagcagaatttgacaggtgaaactcactgaagagcattaggaaaagtgaaggccagcctggcaagtgcatttcttggagggacggtatgatgaggtttgtctgtatcatatccgcgcaccttcccagtttagccgcccgtcccgcccccaaggtcgcacactgagatcactgggaggaacaggcgcccatttcattcctacacctccgtcagcccaccctgcctatatatgttcagtgcattgtggagtaggaaaccagcccttggtacagaaaggtctcaggcatcggtattcattgaacaaatattgagcacctactatgtgcactgggaaaacagtagtgaaaagagtagacgggggcttacatggggttaggggagacacagaaaataatcacaacatgtaatactttgaatgatggagcccttccacggcctcccctcttctttttccctctcaggacaaaagaagaatgaagcaaggtaaaagagatggggtagggtgggggaagggactaatgcaatttgaagcaggtgggtcagagtctcacacattcgagcaaaggccttatacacatttgagcaaagggggcaagccatatggaacattcagggaagatggagtctagattcagctgaaacccagttttctgtagcttaaatatgtgctactgatggaattagtttatttcttattaaagttggtcctcctgatggttataagcccaatgcaaaatgtcaaattaaatggatagcctttcatattacctacatgatcttcatatccaagcggatgtcctgagaaaagcacagtaaaacctgctccaggtatcaacccaccttccttatatgtgtggctattctctaccctcataaaaaaattatagtcttcttaagttgccctgtaaagaggtgatcttcatggataacatacttctctacctacagtctgaacccatttttgttgttgttgttgttatttgtttgttttgtatttccagtagatacagagttttgccatgttggccagactggtctcgaacttctgacctcaagtggtccacccacctcggcctcccaaagtgctgggattacaggcgtgagtcaccatgcgcggcctgagcccatttcttctaaagaaactaaattgaaaggctgcacacctcgcaatgctgtgctggcagacatgtagacaaggccagagaataaaatggccgggggggttagacgtctgagctatgaaggctcttcttgtcccctctgggaggccctggagaaagtcatcccctccatccagggtgctgggccctcctgctgggtagagataagggggcttctggtccctcccaggcaaacgctgatgattagtgacaaggcataaaggtgccaagtctcaccagtacaaaatcaatggctggcgtgggttaaatttctgtccagaaatgattatggaactagcaagacatactttattaaatattttaatgaatcagcatcatttcatttcttttattcgcatcttgcactttcatttttactgacttctttttttattttttattttttcattaattaattaattttttttgttttttttttttttagagggagtctcaccctgttgcccaggctggagtgcaatggcacgatctcggctcactgcaacctccgcctactgggttcaagtgattctcctgcctcagtctcccgagtagctgggattacaggtgctttactgacttttaaaaactcattcaaaattcctcatgtataaaacctcctggtgcacatattaagaactcatgggttataactgaaaacagaacttcattctttttccccaacagagagtaccataacaattgttattcctaatctatggcttatttcttacaaacattgaatataacagctttccaatgagtaaatttttatgttcttatgcagtgaaagcagataaaatgtgctttatgttggtccttttcaaaactggtagaaaacacagtccttaatccagaaattgtgaactctaaatacaggcttaccagaaaagcccttgaaaggctaaagaaatttgcggaaccatatgatatacataatatgaattttttctgacttaacatatttttaacaaaatgacacaccaattccattagcaaacagaaggctaaaaaggcacagtgtgtgggctaacggagataaggagcaccccaaccaggagggagagggtttgtctggggcctggtgagttcattagtgaataaagcactcacctgtcacagacaccactctgagtgcagcctgtgatcctaaataaaatgaatttgttggtttcagctcagtgcttcagggaaaggggtgggaaatctcttcattcattatttgccatgattggcacctctgagctacacaaactaaatttagattattcaactctgattccttaatcagaaaaataactggggaagggaggaatcaggaggcattcagggcaagagaaacagtggctgcatgtaacaaatggtaagctataatgattactcagagaaatctgatcaattgtccctagaatcattttacaacaaagaggccaccaaatccaggccaacatgccatgcgttttgacttgcccctcttcaccacgcagagccttcagcccaatggtggtgacgggtttattaatccatctgcccatatttcctgaccatctaccatgagcaaaacattaggtcatgtagaggataaaagagtgaaaaggaaaacaaacaacattctcaaacagctcattcgcttatgaaacaagcgtatgggagactccagtctatgtcaggcacatggcaggcactgggtgtgcagcaatgaaccggacagtccctaatttcacggaacgtaccttctagaaggcaaggcagacaatcgttttacaacaaagatgaaagacatacaacatattgtcaggtatggctagggaccagaagaaagctaaaggaggtggaggaagggagagaggccgcaactgcccaggtcagtagtgcagtcaggaccagcctctctgcaaaggtggcatttcagcagtgacctgaagggagtgagggcgttgtccggggaagggcttgcaagcagagaggccagcaagcgctggaacacatttgaggcttgtattcatttcctagggctgctggaacaaaataccacaaaccaggcaggcaaatgtgttgtcgtccagttttgaaggctagaaatgcaaaatcagggtgtcagcagggctgtgctccctctgaaacctgtaagggagaatccttccttgccttttttagctcatggcggtggcaacaatccttggcgttcctcagcttgtagatgcagcactccatcctctgcctccacagtcacagcctgtcttctcctcttggaaggacgccagtcattttggattaaaggcctactctaataacctcatcttaacctgactgcgtctgcaaagaccctgtttccaaataagttcatgtttacaggtacctgggggctaggatgtcaacatgtctgttgggggaacacaactcagccccataacaaggctgtcaaagaacagcagggaggccacatggcttgagtaggggggcggcgagaggtaggggaaccagggcggattgatgtagaactttgtaggtaatgaaaaactgtgtcttctgagtgacctccattcttcacttatactgcatgactaaatgtgcccattgtggctgggtgccgtggctcacgcctgtaatcccagcactttgggaggctgaggcgggcagatcacctgaggtcgggagtttgaggccagcctgagcaacacagagaaacccgtctctactaaaaatacaaaattagccgggcatggtggcacatgcctgtaaaccagctactgaggaggctgagacaggagaatcgcttgaacctgggaggcggaggttgtggtaggccaagattgcactgttgcactgcagcctgggcgacatgagcgaaactccatctaaaaaaaaaaaagtgcccattgtgattttttttttttttttttttagctcattcatactgggtgttttttccagggttctctgcttcctgggtggtggaagggtccctaagaggcctttctgatttgcttcttccaggacccaggggtcccaccagtcttagaccaagtttgtgtgaatatctcaacttggttgtcctgttccctgcagttgtataaattcacagccagggagtaggcattccccagagccctgggaagatggcaggcttccttgtgcttctctgggctagagagccaattttctggattacttttcacagaagtgccgggcctctgcggccctgcttcatggaggggtctggttctagctccaccttcctatggctgcatgggcattctaggagctgggcacatgatgtgttcactgtgaaaactcatggagttgcatgcttatgatgtatgcctttttctgtataaatgttatactttaatgaaacttttttttttaaggggccccttggtgcctttatctggctgggcactggctgggctcaattctccctggagcccccattcctaacctaacagctctgactttgagattctctctagcccctcccctccaattctgatacccagagatgttcctttctcacctaggattttgagggcaaatagatgtatctagtaaatctgtttataatgcggtaacaagaggtgagcagaagtttccctgataaaagtgagagagggtttcaggctaagaagatgaaggaatgctttccatcgaggaggtgtctgaacttacaataagaggactgagataggctgaatgtgcagagacagcaagaaggtggaagagcacatgagaaccaggagcaagaccttcacttggccatagcacagggtatggcgaggactaggagaaaaggctggggtcccagcccgaatgcactgagggcttggcccttcataggccagcagaggcatcaagagccatgacagtcagggaggtgagcagctgctgtggcagagaatactgagcaaacagggtgtgggtcataggacgtaataggggccaggcaaggagaccaagctggacagagtggccacaggtgaggattgaggtgtggagcagagtggcaatggaagtgaagatggcaggggagcaaatggtatggagaaggccaggcccagtggctcacacctgtaatcctagcactttggaggctgaggcgggaggattacttgagcccaggaatttaagaccagcttgggcaacatggcaaaaccccatctctacaaaaaatacaaagattagctgggcatggtggtgtgcacctgtagtcccagctactcaggaggctgaggcaggaggattgcttaagccagggaggccaaggctgcaatgagcagtgatcacgccacttgcactccagcctgagcagcagagtgggaccctgtttcaaaaaatatatttaaaattttttaattaaaaatttaatttttttaaaaaaagatatggagaagtcgagaggacaggcacaggttatggcatcttaaagataagaagcaggctggaatcaagtaactccaaggtttctggtcttcatgaggccgaaaaagagaagcacattagttagcagcagagctggtctgagacaaagctgggggctctttgtcattgctgttctcattgttttgtttctaaccacatatattttatgctgcaggaagtagaaaagacaaagaggtacagctaatttttttttttttttttagacagagtttcactcttgttgcccaggctggagggcaatggcaccatctcggctcactgcaacctccgcctcccaggttcaagcaattctcctacctcagcctcccgagtagctgggattacaggtgcctcccatcacacccagctaattttttgtatttttaatagagacagggtttcaccacattggtcaggctggtctcaaactcctgacctcaagtgatccacccgcctcagcctcccaaagtgctgggattacagacatgaaccacactgtgcctggccaaatttttttaaaaagttttagtggtcattgatatagcaatagtgattgaacctagccattcattcatcattttttcagagcctgctatgtgccttgcatagcccaccgctgcccacaagcagcttatacaccagcagagaagcagctatctaaacaaagagaaataaaaggtacagaggtctgttctgggttccatacagcagcgggaggcaaggggcagggctgtcaggacagcccccaggcagaggctgctggtgccccgtatcatttccaggaagacggggcggctgctgggggacaggccttgcaggtcaggagggcagcaagccctgtgacagcaagatgggttctgcagctgctggttggtcagtgagaagggacgatctgaaggatttagcgaggtgagtactgagtcctggaggtgggcaggggccggctcacagggagcctggtgagccagggtcaaggtctgggctgggtcctgtatgccacagactagagtagctgcaacaaggaaagttaagacaggcttctgggtcacactcacatttagcccgcaggaaaaggagtcacaataactgtaatggcttccatttattaagtgccagacatggaatcgctgcaactggcttataaagaggaggtaccaccctgttttacagatgaggaaaacagagtcacagaggtcccctgacttgcctgaatccagttagcaaggggcagagccagtatttggacccaggtatgtttggctcccaagccagggctggctccataccttcagggtgcatctcacaagagaaaaaggtgacagaaagcaggggtcaggccaggcatggtggctcacacctgtaatcccagcactttgagaggccgaggcacacacctgtaatcccagcctttgagaggccgaggcaggcttgaggtcaggagtccaagactagcctggccaatgtggcaaaaccccatttctactaaaaatacaaaaattagcctggtgtggtggtgtatgcctataatcccagctactagggaggctgaggcaggagaatcacttgaacccaggaggcagaggttgtagtgagccgagatcacaccactgcactccagcctgggcaacaaagcaagactctgtctcaaacaaaaaaaagaaggcaagcaggggtcagagagcgcctatggagttctcaccactcacccaggtgttcctgtcaccaatgtcacggatttgttagaggcactgaattatgaattcaaatttgtgcgtgaacctgaatgcacgaaggaaattcttttttaacagacatagccagagaataataggtatctacccattcccataacccagttaaatttcacttataacctttcagagttacatactgcttttttcccatttacagagaattcatcattctccttgctattttttccttcctaatagctaataacggatcatttcttcccttttgtttatgcccactcccttttgattggtcttcaaatacagagtaatgacctctgggtaaagatggggcttgaacactagggtatagtttcactctctcccaaaaaccacactgaaatgatggtagaggttttgttcatgacggtggtattttttgtttttaagcacaaacctaaaagaatgggaaaaaagaaaaagggaaccaccatggaatttttaaagtggcagcagatgaataaatacttaatgttttagcagacctgagaaaactgaatcctaagctggccatccgtattaaacaaaaaccatccagattacactagggggctcaggactggcagtcgcaggtaccactggaagtagggatgaaaggagatgctagaatgagatggacggaaagtctgttaaagcaggctgggcacgatggctcacgcctataatcctagcactttgggaggctgagacaggaggatcccttgagcccaggagtttgagaccagcctgggaaacacagggagaccctgtctcaaaaaataaataaataaataaaatcaataaaataaaattaaaaaaagagtctgttaaagcagcagattgcctagattcccaccctgcagtggagtgactgctccccccaaacccctaaagctaactagatgtttggttcctggagaggtaacagagggctatggactgcagatcccaagcacagctgagagcagggccaccacagaaaacagcttagtgaactgtactaactgaaggtgcagagacccagccctcttctttttccctccacaggaaacccaactagcctaagaagaaagacctaacagacaatggcatgggcctcccctgctaatccacctagggcagatagcctacagtaaggctcacatctattcacatgcttggagcatccaatggacattttaatctcctatcctgaattatctctgaattttcagcagataaccaagcagcacctgccatctcaagaaagcctgtaacaggaaagccagagaccaaacaaagcaggaaaaaaaaaaaaaaaaaaaaaaaaaaaaaagcaacccaacgtggaggaaactggaatgatacaggaagaaaactagaaaacttagataaaaaactaaagacagaactttctgaaaccggaataagaattttttaaaatatatttttactatggttaacagaaataaaatactcaaaggactggggaagagttgaggaaaacgccccaaattagcagcttaataaaaaagatggccaggcgcggtggctcatgcctgtattcccagcactttgggaggctgaggcaggtggatcacttgaggtcaggagttcaagaccagcctgacggacacggtgaaaccccatctctactaaaaaattatgaaaattagctgggcatggtgccatatgcctgtaatcccagctacttgggaggctgaggcaggagaattgcttgaacccggaggcagaggttgcagtgagctgagatcacgccattgcactgcactccagcctgggcaacaacagcaaaactctgtgtaaaaataaaataaagtaaaataaaataaaataaaaagataagggccaggtgtggtggctccactataatcccagcactttgggaggccaagctgagaggattgcttcaagcctggaattcaagacctgcctggacaacatagggagaccccatctctacagataattttaaaaattagctgagtgagctggcatgcacctatagtcccagctacccaggaggctgaggcaggatcacttgagcctgggaggtcgaggctgcagtgagctatgatcatgccactacactccagcttcagtgacagagtgataacttgtctcaaaaaaaaaaaaaaaaaaaaaaaagacaagaaaattgaaaagaggatttctagtatctaaatagcagttgtagaaagaacaaaaaaacagaggggagaccttcaatgaaacaatttaagaaattttttcacaactgaagggcatgactttctgtattgaaagggccaattagaatggatactctcaataaatatcatcatgaaatatcagacattgaactaagcttccagaatagacaggtcatatgtaaaggaccatatatcagaatgcttaggaattctcaataacaacaccagaaaaccaaacttcaaaattctgaaggaaaatgctttctttttattattatttttagagacagggtctcacactgtcacccaggctggagtgcagtgacacaatcatggctccctacagcctcaaactcctcagggcaaaagatcctcctgcctcagcctcccaagtagctaggattacaggtgtgtgcaccatcacacccaactaatattttaatttttttgtagcaactgggtctcgcaccagccttgccaacattgcaaaaccccgtctctactaaaaatacaaaaaattagccaggcgtggtggctcctggctgtagttccagctacttgggaggctgagacatgagaatcacttgaacctgggaggcacaggttgcagtgagccaagatggcgccactgcactccagcccgggtgacagagtgaaactccatctcaaaaaaaaaaaaaaaaggcggtctcaaacacctggcctcaagcaatcctcccaccttagcctcccaaagtgctgggattatgggcatgagtcatcgcacccagctggaaaatgctttctaacccacaattctttatggagagtatgtgaagatagatttaaaacatttttagacaagcaaggtctcaatgaatttaccttccatgaaccctttctcaaaaaactactggacagccaggtgcagtggctcaggcctataaccccagcactttgggaggccgaggcaggcggatcatctgaggtcaggagtttgagaccagcctgggcaacatggtgaagccccgtctccactaaaaacacaaataatctgggcgtggtggcagacgcctgtaatcccagctgcttgggagggtgaggcagaagaatcgtttgaacccagttggtggaggctgcagtgagccaaaatcatgccactgcactccagcctgggcaacagagtgaggcctcaactcaaaaaaaaaaaaaaaaaaaaaaaaaaaaactgctggaggatgtgctcaaccaaaatgaggatgtaaactgaaaaaatcaggaaacatagaaaacaggaaacaggatgtccagtacaaaaaaaaaaggtaaagggaacacacaggatggtaatgaaagatcccaagatgacaactatgttcctcgagggcaactcgttcagattaaagcaggcaaaggctccagaagatgggaagaagtaactgatagacaacccaatatatccaaacatcttttgtgattgaattattaaagaaaaaataagacaaatttagtatagggaaaataaaaagttgggcagaaagagaaaacaactattgtgaactatgcagccaaccaaaattataattgaactaagttggaaatatggcgacatggtttgaacgtttgtcccctccagatctcatgttgaaatgcaatctccagtgttggagggggtgcctggtgggaggtggtggtcatggggaggaatggcttggtgctcttcatgaagtgatacatgagttcttgcactgagttcacagcagatatggttgcttaaaggagtgtggcacctcccccatctcttgctccctctcatcatgggatatgctggcttcccctttgccttctgtcatgattggaagtttcctgaggcctcaccagaagcagatagcaacaccatgcttcctgtacagtctgcagaacggtaagccaaaataaaccacttttctttgtaaattacccagctgcaggtatttttttatagcaaccccaaaacagcttaatacacttggggagatgagaagggtgaacacgaatggtggggataggaaaaggaagaaatgaaatccttatatgccagagaagggcaataaataacgcctaaaactgaaaaatcaataaagtaatataagcatgttatttagcaatttggaggtaaatactgaaaaaaagctaaaacttttgaacaccttcatttctgtaagttggggtactaagacaagttttatccaatacaaacttgattttgactgtagaaactagtctttgtcccacaaacaaagtttatcaatatctcttcaaagatgttcttcacctgatcatcacattggttatgatccataaggcagaaggaaacttttcagcataagaaactgagtcattaaccagcaatttccaaatactagaaattgcagtatttgtatatcatgacatcccttttttcccagaagggctggatgaaatatacttattctatggcaattcaaaattcaagctttgaagtttctcagccctcagtgttcccatttcaactacagagattaatacaaaatcaatagagaacctacagcaataataagagaggcttaaggttgagtttagaagtaggaggaagccacctggcgactgtcaacctcactgtgcaacaacctcccctggggagcttttaaaaaataccctggtcccatttctgaaattcagattcaactggcctggggtaaggcccaaacaccattatttttaaggtccccaaatgatcccactgtgctgccaagattgcttttcacagagttgaactactctacgtattaaggacaacatttttaggaaccattacgaggcagcaaggtggcaggggctgaacggcaaggtgggaaactgggtcgcttgaaatggctgaaggacatttaagagggcaagttgatatttaagcaattgaattagcctcctgtttgtctccaaaactgagcaggtcacacaagtgccaaaggtggaggggtttttggtatgaaaagcagagagtttcagggaggagaaagtcacgtgatggaagtcctgagagggcaggggtgtttgtgagctagccatgggaatgcgggatggcatctgtgacacctgaattagggtagtaactacacagcgaagggagtgaagtccacacgcgtgaggtttgctgctcaccgtgctcagtctctcggcctgaggtcaccaccttaactcccttatccatatcctggctctcctttaatattttaaaactttgacctgtttacaccattaaaattaaggctaactgagcctaacctcttcactttaattctgataaaatgaattgcttagttgaagtcatctacagctcattcacactcttccaagtattttttatttaaagatgcaggctgaatagattataaatgcatcatttcttcctttgtttttttttttttttttgagacagtctcgctctatagcccaggctggagtgcaatggtgcaatcttggctcactgcaacctctgcctccggggttcaagcaattctcttgcctcagcctcctgggtagctgggattacaggcacctgccatcatgcctggctaacttttttatttttgtagagatggggttttaccatgttgctcaggctggtcttgaactcctgacttcagatgatctgcccgccttggtctcccaaagtggagggattacaggtgtgagccactgcacccagcctaaatgcctcattttgacctgtcatttcacttaattgcaaaacaggataaaatctaatgtgtccaacagtaacacaaaaaagattacaaaaaagatttaaccatgacccacatatctaacgttaaaaaatcattcgttctcattaccatataacgttagcaatatctactaaatttagtagtacttaatttcacatatatacatcataaaaaagataaaataattgcaaaagcatgaacgaatgtgacaaagagatgtttagctttaagaaaattaagccagcaaagagtttttacgggtgttcatttattgactgctgggaatacagcctattgagaatacatgacatgcatttggtggagaaatcaactaaatctgaaatgaagccattcagtaagcctgctgtgagttaataaggtagcacagattagatctaaggacatggtgggggcaactcaaacagccactcacaattgttattaagattccagctacaatttcttttggaacttatttattcttaattacttaggaattaccaggaaagagggaaaatcaatctgcctctttaccttaaattaatgctaagagggatactgtgaatcactaaaaaactctccccaaaattatgttcttacttcaaatcctttaaggcaattctatttttacaaattcttcaatttctatgcctcaggattattagcagctaagcagagttagaaaagattaataactgatacaaaaggctattcatttgattctagtgtttactgctgaattatactgtgttctaatatgagcagatttttatacgatattgccaatttcttcccccaagatttttgttttaattcattgatgcaataaaataaatcaaagaattcaaggtacacttaaaaggacagaaagataagttactggagtatcttacaccataatctaaaattgttgaattatacatacatataacttgaataaaatgaataacttggataaagtgagtaaaatgctgaaatgtatccctaactacagtttcatgccaggtattttccccgaactttgtttcccgaacttaagaaaaaaatggatattttttcttaagatgacaaccttaatatcacttgatgttcaggtgatttgagatagtttttatggtagtagaaagaaaaacagaaagagaaaccccaatgaaacaaaaaaaggaagattctggctttttgttttcttttttaaagagcctgttcctttcataatctttcctccacgcttctggagaaaatggttatggcgtgcaacgctggacaaatcgagggtataagcacacgtctcggatgtgatacctattcagaatccacgttaagaatcgttccaagcccaagccatatcctccatggggacatgtaccgtattttctctgtttaaaaaaagaaagaaagaaagaggagtaaatacttaagttaaaactttcatctaagacagttaaaattttccaccatgaaaggagttagctcactgtggttaagaattcaactatggccagattcagtggctcgtgcctgtaatcccagcacttaatctctatgccttcatgaaccatgcataaagaaataatttggtatgaaaaaatcaaccagggaataagtactaccctggaaagaagagatttttaaaaacttttaaaataagtcaatgtctatttataagaggaaaatgaagaagggtactagatactggtaggatcaattttttaaaactcagttgcaatcaacaagccggccgttaaacaggttttcaaatgaaattaacatataacttggccaaaacaaagctggcaatattcacacaccacattataacctgcaaactgaatatagctcattcaaataccaaagtactaccctgaattctccccttttaaaaatttcaatatatacagaacgattacagtggaaaaaaatgttgagtacttaaaaaattggttttacctgatccgtataccagtaatagggagtggggtcaatcccttcccttttataacctgccagtatttcttcactatcaaagatacgcattgagcctcccacaatctcaccaacattgggcatcaacacgtcgacctttaaatataagtgaaagaagatacacaattactatcaagcgatcagacacagcactgccctagagtttaaatgaaaattacaattaagctccaagggctaaaggagccactatgatcatgtaatattcaaatgtttacatttctctaatttaacaaagcatgtcaacttcaatcaggggagggtgaaaaaacccaacgtctttaaatattgttattctagatagagaatgaaatatttggcatgagctgtacctgattccagatgacagtccccacccccttaaaaagcaaaattattaatactctttgaaacagaaactgacagattcagtaagacgggaatcctcaggacatcgctgcatgtagaaggacttgatctccacaggaaatcgacacagcaagattggttcattaatggtgtctgtcatcagtctctcaggagcttctgggatatcctgaggtcaaacaagacttcattaacatttacaacttggatcgcaacaagacagaagcagctccttcaccctgtaccagtccttcctcctatcaattcaacagagtagaggatacacacctacccttaacccatacacatttgtgtaaagaataatttctttcaaaaagaaataaacatattcttaaaactcagttatttaatgaagcataaaagatctgtctccctttacagcatatctcaagcaccatgctgtttgatgaaggaaaataaaaaaaaaaacaaaaacaaaagccagccccaagctgtgactagacacagctcagtatttttctcagtggcccgttttgtctagctctgaagcaaatgaggtccacttagtcccgtaaggcatacggtaatcatgaatgctccagaacatcattgatctacacacagagtatattactaatgacacttatctttaaactctcctgttatctacccttctttcctgttgtaatcaatcagttatgccttcgatgacagacacaatcataagacaaataaccaatgtcaaactggtaagtgtaagcacacctggaatagttacccaaacaatgttagatgatgacttaagcgcatcagtttctctctcaaaacatccttctataccacacataaattaaagttaacacagaagttaaaactgacaactctcgtcccagtaaaaatggattgagagaactggagaagactcatagatttgtttaatgaagaagtgaaatggaggtagcaatcacctagcacacctgttttcaagctccaggctctggagcccttgcgtcctcggagacgccgagaggtaacaggagatgagtgggagagctctagtctctcagcttgcatctgctttacacagcggggttctgcataagatttagttaggggaaaacaggtcttatttcataccccccaaagcctgagggtcatgtatccactctagtgtcctcatgtgtgtggaacagtagcaatgtatagtaaatgctgacaggctccccctgccattgtcctgcctaggcatttagctccggtagtccccacaatcttgcaaaacagatgttacttccaaggtagagataaggaacctgagagggggtcactggtcttcagttacacagcacaaaagaaaagaggtgggagctaagcccacctggggggccttctgactccacagcttgtgttctttccactcaactacactattttactaagtattaggaacactaaaagtatgcaagttctcaatacaaaattttgtcattatacatcataaactgaattcataggctgggcacagtgtggctcatgcctataatctcaacactcgggaggccgaggtgagaggactgctcgaggccaggagtttgagaccagcccagtcaacacagcaatacctccatctctttaaaaaaaaaaaaccaaaaaaccaaactgaattcacagaaacaagagtgctttacatagacccagtatattgtttcacctattaattccttctaaaacccaaaactagttagcagcatctacacacatttcaactgtaaaacaattagatgtgcaaatattatgtaagtaatggttaaatgcacaggaaagagggcctagcatagtcttggaaacttgagccagatgcagtggctcacgcctgtaatcccaatactttggaaagctggggtgggaggactgcttgagccaaggagtttgagaccagcccgggcaacatagggagacgccatctctacaaataataaaaaattagctgggcatggtggctcacacctgtaatcccagcacttttggaggctgatgtaggaggaacacttgaactctggagttcaaggttgtagccagctatgatcgcaccaatgcattccagcctggacgacagatggagatgctgtcccaaataaagaaaatttgcaacccaagtgcatgctgggagagtggttctcaggcaaaaccgaaatgctaagtttacctggggcactaggctaccttctccaagaccttctctcttggttttgcatttttaaccaatggctatcttctttctcgccttccacattaagaagttttaaatcactgttttgggggaggggatgaacctctttttaaaagcacaagatacattctccagaaaaaaaaaaaaaatatatatatatatatatatctatataccaacattttgcatgtgatttcaaaggcttcacaaccttctaaagcactcctaccagcctagagaatgataaagagagcttataagctgtggccaaggaagaacaatgaaggaagagggaagaggcaaagcatgagacatgaaggcagcttagaaactcacacttggccagaagcggtggctcacgcctataatcccagcactttgggaggctgaggtgggcagatcacgaggtcaagagatcgagaccatcctggccaacatggtgaaaccctgtctctactaaaaataaaaaaattagctgggcatggtggtgtgcgcctgtagtcccagctactcgggaggctgaggcaggagaatcgcttgaatccaggaggcggaggttgcagtgagccgagatctgagatcatgccactgcactccgtaggcgacagagcgagactccgtctcaaaaaaaaaaaaaaaaaagaaaaaaaaagaaactcacttacgcttactgggtggtacagaacaggcactgtcctaaggctgactctgttaactcagcgaatctgcaggcaacccaagaagcaggtcctgctgttaccatttatttgaggacaggcagatgccacccatgttactagttcattaaccagaagaagagaattggagcccaatcccaccttggaaacaatgagagaaagggatacatacttctccaaattcatagaaagttccatcttctttctttacatcatgttcttttagccaaacgatagcatctgaatagttcatccgtttgaaaggccgtttggggggctgaaagttctacagaagaaaggaaaaatataatgtgtatatatacataaatataaacattaacactaaaatttccattaaaaaactattataaagtattacttcagtgaggtgtggtggctcatgcctgtaatcccagcattttgggaggctgaggtgggcagatcacttgaggtcaggagtttgggaccagcctggccaacacggtaaaaccccatctctactaaaaatacaacaattagctgggggtggtggtgggctcctgtagtcccagctactcaggaggctgaggcagaatcgcttgaagctgggaggcagaggttgcagtgagcagagatcgcgccactgtacttcagcctggcgacagagtgagactctgtctcaaaaaaaaaatatatatatatatatatatatatataacttcagactagaaaactatgtagacattcctaaaatggaaaacatgagcctgttatataactgaaaacattataaaattattgacagtgactaacatcaaattctagtcttcaaaataattagtcacttatttcagctcaccaagccatcaaatctacaaaaactgagggtgaagacttcattgtcttccaaaaaaggactgtgactttttctttccataaacactgcacctaccgggttgagctcatgcactatgctccctgcaggtgacttcaatattcgatctaccacatcacaaaccaagtcctccaaccggttcaggaggtcgtcaaaagtcaggaaaggacactcagcttccacgtgagtgtacctgaagaacgagacaatagctcagcactgcttttctcctgcactggttttttatccagcaaggcttttaacattgggaagctgtccataaaatgccaacaatgctaccaattcccaactttgcaaattagctgtggactcccctcttctccactgagtagcaatttcttgtttgctcctttatatataaaagatcaagtcaaagtgaaaaaagagaacttagctacgatctaaggtggcaaaactttgttatatgttcttccattaaccacttaatatatcagttggttttttttaaaacataaacataatttacctacactaagatttcttctctaaagatattacctagaaagaaataaaacaaaaagacaacttcatactcagccaggtgccttcgtgttctggactgctctgcccggtatgactgagcaatacaaaaaacatctcccagggctgggaggcaggtctccaagtacaactgagaggattgagtcaaaaatgcctcttccccaaaatagtcaagcttgaagagtgtggcaccaccttctacttgtgtttgcactaatgttggaggagtaacctgttcaaatgcaaagaaggaataaatcaatgctatcgtgagcaccactattcaagtttcaaaacggcaaaaaacatattctttgcaaaagctgacgaatgcatacttacttcatagtaccccctatcaaagaagtgatctctaaagcacctggtgaccatggatcgtgcttttaggattttggacatgttttctcctcggatcatcatgtgtctgttgttgagctggacatcaacgtcagactcctcattgatcaggttgtcagctcctccagcaggggccaacccaattagttcccagaagtcacaactcagctcatggccacctggagcctgcattttttaaaagtggggtccagagaaagagggaaaaggaaataaaaaattaacagtattgaggattttaatttatgtcaaagttttggtaagctgagatttttaagaacctcctaattctcagctttagtttagttttatattgatatttttaccaatgttctttctggataaatacacactcacatacacacaaatatcttttttttttttttttgagacggagtctcactctgtcgcccaggctggagtgcagtgacgcaatcttggctcacagcaacctccgcctcctgggttcaagcgattctcctacctcagcctcccgagcagctgggattacaggcgcccaccaccacgtctggctaatttttgtatatttagtagagacggggtttcaccatgttggcaaaactggtctcgatctcctgacctcgtgatccgcccgcctcggcctcccaaagtgctgggattacaggcatgagccaccatgcgcagcctgtgcgtttccatttttaaaagatatttgtgtctgggcacggtggctcactgaggcgggtggataacgaggtcaggaaatcaagaccatcctggccaacaaggtgaaaccccatctctactaaaaatacaaaatattagccaggcatggtggcgcacgcctatagtcccagctactcaggagaatcgcttgaacctgggaggcagaggttgtggtgagtggagatcgcaccactgcattccagcctgcgcaacaagagcgaaactccgtctcaaaaaaaaaaaaaaaaaaaaacaataaaaacaggctcaaattctaataagaaattctctgaacatatttaggtgggttgttaagtttttatttccatctggctgaaaagtaattcatatatctacagcacagtggctatattatagcccatgaggatgattcaggaattccgtaaggctggaaatcattgtattctttttatcacctgagttgtacaatgtacatatttcactggaaaaggcatagtgaatttgacatgtacttcacatttattgtatttatatgctgtgatggttaatattaagagtcaacctgattggaatgaaggatacaaagtattttctgggtgtatctgggtgttgccagagaagattaacatttaagtcagtggtctgggagaggcagacccaccctcaatgtgggtgggcaccacccaatcagctaccagcctggctagaaaaagcaagaggaagaaggtggaagagcagacttgctaggtcttccagccttcatcttcctccggtgctggatgcttcctgtcattgaacatcagactccaagttcctcagcttttggactcttggacttacaccagttctttgacaggggctcctgggcctttggccacagactgaaggctgccctgtcggcttccctacttttgaggcttttgaacttggactcagccactactggcttccttgctccacagcttgcagatggcctatcgtgggacttcatcttgtgatcttgtgagccaattctccttaaaaactccctttcacatatacatctatcctactagttctgtccctctgaagaaccctaatacatatgccaaatgtacaaacaaagacactggaaaacaaaccaataaataaactattcattcacccagtgcgaaactcaatccactcacctgcttgccctttggggtaagatttagcattccatacactgcaacactgctctccgtggacaagagaactccattgtagcactgacactataaaaaggtcaaagctcaaatttagttattcacattgatttaaaaattctaccatatagaaagttaaagggattgtttacaaacaagttatctgatcaaatactagtaaaataaagagtgagatggccactgattcttaatattaaaatagatatttttgtggaagacagaggtttatctatatatagacatatacatgtaaatatatacatatacatgtaaatacacattttacatacatggataaatgacactgacccacatcacttaaaaatatctggacagtttatttatttatttttaaaaatctagactattaaagtaacatacaggttaggcacagtggttcatgcctgtaatcccatgaaggaggctaagttgagaggctcactggagcccaggagttcaagaccagcctggacaacaaagggagagataaataaaataaaaattggctgggtgtggtggttcttgcctatagtcctaactactcgggaggctgaggtgggagaattgcttgggcctgggaagtcgaggctgcaatgagctatgatgatgccactgtactctttctgagaaaccctgtgtctcaaaacaacaaacaaacaaacaaaaccatacagagcccatctacactataatcacttcttactaaagtcattaggaaaaaactgatggggaactttaaaaggaagaagtcaggctgccaacacctgaacccactagtcataaaaaagacaactggccgggcacggcggctcacacctgtaatcccagcactttcggaggccgaggcgggtggatcacctgaggtcaggagttcaagaccagcctggccaacatggcaaaaacctgtctctactaaaaatacaaaagttagctgggtatggtggcatgcacctgtagtcccagctactcgggaggctgaagcaagagaatcacttgaatctgggaggcagaggttgcactaagctgagatcacgccactgcactccagcatgggtgacagagcgagactctgtctcaaataaaaaaaagaaaaagacaaccacaccttacatgcctcttgacgtgatgcaactaaaagaacacagctttgcccatgaagtagttgtgccaaaaaactgaacctaatcagacctaacctccaatttataaaaaatgcagacactagaagaacatgctaaaggacaccacaaggatgcaaacaaccaaatccataatgtgagaagttccacaggacaatccaccagggttttcccaagaaatacatagtaatgggtggggagagggggcgggttgcaaaagaagagagaatgcaaagagagcagcagagttataaagaaaatttcaaagtcatatcactaaacgcagcatgttagtcttgtcagaatcctcgttcaaatcaatcaactataaaaaggcagtacgaactgataacaagaatctggatattagatgatatttagtagttgtattaatttggtggagggtgtgataatagtaggtgactattatctttttttttttttttttttgagacaaggtttcactctgttgcccaggctggaaggtggtggcatcatcttggctcactgcaacctctgcctccctggctcaagagatcctcccacctcagcctcctgagtagctgagactacagatatgcaccaccacacctggctagtttttgtattttttgtagagataggatttcaccatgttgccaggctggtctcaaactcctgggctcaagcagtctgcccacttcagcctcccaaagtgccgagattacaggcatgagccaccatgcccagccacattatttttcttagagatgcataagcatgtgtaattaaataaaatgatatgatgtctgaggggcagtatcataccaggattagccatatataggtggttacagaagctgggtgatgggcatttgatgattttttatatggttctattttgtaatgtgctggaaattttccacaaaagttttctccctctagccttattaaggtataataaacaaataaaaattgcatgtttatggtatacaatgtgatgttttgattcattgacattcactgtcgacataataaatgttttaaataaatgtatacaaaacaataaaggaatctactgaaaacatctaattttcaggcataaataagagaaaatatttaccaactcatccgccaagacacactgaagataacctgtaccatctcgcaacaccagaaacattaaattctttcctaaaaaatgagaaataataatttaggcagactgttctcaaggcattaaattttatatatatatataattttaaagatagggtctcacttcgtcacccaggctagagtgcagtggcacaatcacagctcgctgcagcctctacctcctgggctcaagcaaacctctcaccttaccctcccagatagctgggactacaggcacatgccaccacacctggctaattattttgtagtgacaagggtctcactgagttgcccagactggtctcaagctcctgggctcaagcaatcctcctacctcagcctcccaaagcgctgatattacaggtgtgagccactgcacccagccatgacttaatcttatctaaaggaaactccaaggttaaacattcaagttcagacctcccacatggctccctgcccctgaagtacccactggtaataccactactcagtatttgtaaaatattttattttcaatgtattggactttcaaatcctacatgatccccaagatccacacaaccaggggaaagcaggacagaaggcaacatgagttaagggattatgccttatctacccttgagtcccctgcaatgcctggggtagtactgtgcactcggtgatacataaatgttcttgaacaaaatcactttttcttatttatgtcctaaaggtccaattactgaaatccgcttaaaacatttcatttgtatttttgtcccctccaccgtcgcttttttttcagatggagtttcacttttgtcgcccaggctagagtgcaatggcatgatctcggctcactgcaacctctgcctcccaggttcaagtgcttctcctgcctcagcctctagagtagctgggattacaggtgctcacaaccacacccagctaatttttgtatttttattagagaagaggtttcaccatgttggccaggctggtcttgaactcctgacctcaggcgatccacccgccttggcctcccgaagtactgggattataggcgtgagccaccgcacctggcctgtcccacttttcaatgaaagatttgctaatcccttacaataaatagtaaaagtgacatgtttatatattataaaatatataataaaaggggaaagaggaaacaaaatgtcagaaccaagggagaatgcaaatatactgtttataagagtcaaaactatggccaagtttcagactcagatgtcaacctcctatagtaacatcccttgattttcactaaataattaaaactcaacttgacaaatatttactggacgcatcttcatcactataattgctaaccattaaaagagcatttaaaaatttttatactttcaatagtcattttaaacaagaacaaatttaagatataaatcactctatcctttaaagccaggtgaggtgctatgtgcctgtaatcccagctgctcaggaggctgaggcaggaggatggctggggggagttcaagtctagccagcataccaaaaaaaaaaagagggccgggcgcagcggctcatacctgtaatcccagcactttgggaggccaagacagtggatcacctgaggccaggagttccagagcagacgggccaacatggtgaaacaccgtctctactaaaattacaaaaatcagccaggtgtggtggcaggtacctgtgataacagctactcaggaggctgaggcaggagaattgcttgaacctgagaggcggaggttgcagtgagccgagatagcaccactgcactccagcctgggcaacaaagtgagactgtgtctaagaaaaaaagggggagagaaaaaaacccctgcaaatctttgtatgtttttcttcatctaagagcagggatatttaaacattaaaaagaaggaaaagctttgccatttaccttgcctgcgcagcctgtggacccagccaaacacctttactctttggcctctatatccttctaacgcaccaatcttcacctgtcaaattgaaataaacaacatttgttcaataatgtcatttatacacaccaactttttcactaatattaggcagacggtagtaagtgttaaaaatcacaaatggtgcaaaactggagacagcccctctactgcagctcagaaccaaacgcatttcactgtattggcatggtttaaaacaaaacaaaaaaaaatccaagtcttctttcttaatgtaaaactgataatgagaaacacccagaagaatttcagatattgctagataaaattaattaataaatgaattcctttgtcataagtggagcacttgcttcccacaacagcaacaatcccagtccacatgaagccttttccatgaccccacagttcttcaataccttccagaacatggtacttaaaaggctagcttttgtttgggggatgaaggagagaggagatgagtagaggaaggggctgttgcatgtggccaaaaaaccccagctccatcactaaggaaataatacaaaaattcatcagcaataagaactactggaaatctggctgggcgtggtggctcaagcctgtaatcccagcactttgggaggctaaggagggcagatcacctgaggtcaggagtttgagactagtctggccaacacggtgaaaccccatctctactaaaaatacaaaaattagccaggcgtggtggcaggcacctgtaatcccagctacttgggagtctgaggcaggaggatcacttgaacccgggaggcggaggttgcaatgagctgagatctccccactgcactccagcctgggtgacaagagtgaaactctgtctcataaataaataaataataaaataaaataagaactactggaaatcaaaccattttcattcatagtccagcaatctatttgggttccagaaagaacagaagaagagtgaatctaatttcacaattcacaaacttttactctatttaaataaaacatgaaaatcatagatttcaacctcttcattttataagcaaactgacactagagagggttaaatcacttgaccaacatcatgaagcgtagccaggcctgggtcccccatctgctggcattcagttgggacagaattcattcaacatgcatttacttaactgtgtaataaaatgaacccctaaagaactagcctcataactctaaaacattatttctctatgtcccttctgaaaggaaagtaggccaggcatggtggctcacgcctgtattcccagcactttgggaggctgaggtgggaggatcccttgagcccaggagtttgaaaccagcccgggcaatatgggagactgtttctacaaaaattaaaaataaataaaagttagccaggtgtggtggtgcatgcctgtggtcccccctacttgggaggatcgttagagcccaggaggcagaggttgcagtgagcagaaactgcaccactgcactccagcctgagcaacagagcaagaccctgtctcaaaataaataaattaaaatttaaaattaagaaataaaaaataaaaggaaagtaggccgggcgcagtggctcacgcctgtaatcccagcactttgggaggtcgaggtgggcagatcacgagatcgggagatcaagaccatcctggctaacacggtgaaaccccgtctctaccaaaaatacaaaacattagccgggcgtggtggcgggcgcctgtagtcccagctactcgggaggctgaggcaggagaatggcgtgaacccgggaggcggagcttgcagtgagctgagattgaaccactgcactccagcctgggcgacagagcaagactccgtctcaaaaataaataaataaataaataaatggaaagtaaaaacaaaatgtaaaggaacaaaccatgtgacatgcccctcatacacagaaataatgatctgatgtagccaagtccacggtatttgaaaagataaacaaacttacacattttggctctgggagacttggatcatttttaatggtaatcttctttgcttcttccaggttcttttctcttcgtaaactatcttctgcctaattttaatgatgaagcagtttgttaacatggttgccagagttctaactttaacaacgttcacgatggcaaggtcaggactcacctctttcttttcccgggattcactcttcatttgttccctatgccacatctttttaatgttcttcaactgtgatttagaaataacattccacctctcattttctttttgtgaatctacgtaaatggtaggaaatggttctttccctactgtcatcaaagccttgggtagggaggagagaaaagacagttcttgaacattgtacaatacttaaaatcaaaataacatctcaagtataaggcaactggaacaatctaagcataaagaccccaacagccaaaagctgatattggcacagtgactggttgaacatttaagaagcacactggttggctgggcgcggtggctcacgcctgtaatcccagcactttggaaggccgaggtgggtgaggtcaggagatcgagaccatcctggctaacatggtgaaaccccgtctctactaaaaatacaaaaaaattagccaggtgtggtggcaggcacctgtagtcccagctactcgggaggctgaggcaggagaatggcgtgaacctgggaggcggagcttgcagtgagccaagatcgtgccactgcactccagcctgggcaacagagcgagactctgtctcaagagaaaaaaaaaaaaaaaaagaagcacactggttaaagctgaagctctgaggtcctctcacaaacaattacagcaagttcgggtatacacgatacagttccccaggaaaagcagactataagcaacagatcttaagtggctgtagcaaccagcacaggtacaaggacaacagaagagacacctgacagcaaaactcaactgcaagtgacatctaaaaggttagttctctgtgagaaatcagagaagtgtcagacatttttgaaactttcaacaaaacaatggttaagaacacaaaaagcggccgggtgcagtggctcaggcctgtaatcccagcattctggggggccgaggagggaggatcaccaggtcaggagatcgagaccatcctggctaacacagtgaaaccctgtctctactaaaaatacaaaaaattagccgggtgtggtggcgggcgcctgtagagcttgcagtgagctgagatggcaccactgcactccagcctgggcgacagagagagactctgtctcaaaaaaaaaaaaaaaaaaaaaaaaaaaagagcacaaaaagctaaactcatttaatctgaaaaactcccccatgtagaatacctcttttccccaatgggacatatcaagcattgctgtgttatatatcatttgataaaatgtattgtttgtagtttttaaaaaatagttcaaagtacataaaagatgaatattttaaagcctcaaataatctttcaaaatctcttccaagttattgaatcaaacaagaaatgcagtgaattattctctgttgcaagatctgcagcctgcaaaaacggactttttctcagttctacgactgctgcagagaaggagggaatctgaggccgggcatggtggctcacacctgtaatcccagcactttgtgaggccgaggtgggcggatcacgaggtcaggagatcgagaccatcctggctaacatggtgaaaccccgtctccgctaaaaatacaaaaaattagccgggtgtggtggcgggcacctgtagtcccagctactcaggaggctgaggcaggagaatggcgtgaacctgggaggcggagcttgcagtgagccgagatcgcaccactgcactccagcctgggtgacaagagcaagactccgtctcaaaaaaaaaaaaaaaaaaaaaatagagaaggaaggaatctggatcttttgaaaacattcaagggctgggcgtggtggctcacgcctataatcctagcactttgggaggccgaggtgggcggatcatgaggtcaggagttcgagaccagcctggccaatatgatgaaaccctgtctctactaaaaatacaaaaattggccaggtgtggtggcacacgcctgtggtcccagctactcgggaggctgaggcagaagaatctcttgaatccgggaggcagaggttgcagtgagctgagattgcaccactgcactccagcctgggtgacagtgtgagactccttttcaaaaaaaaaaaaaagaaaaaaaagaaaacattcaatagttcatccttttaacaactagacattgtaagaatacatgtaggggccaggcgcagtggcacacgcctgtaatcccagcactttaggaggccgaggtgagtggatcacctgagctcaagagttcgagaccagcctggccaacacggtgaaacaccatctctactagaaataaaaaaaaaaaaaagaaattagccaggcatggtggcgagtgcctataatcccagctactcaggacgctgaggcagggagaattgcttgaacccagaaggcagaggttgcagtgagccgagatcatgccactgcactccagcctgggcaacaagaacaaaactctgtctcaaaaaaaaaaaaaaaaagatagccattgatgaaaatgcaaaaccaagagagaaggtcccatgaatacatgtaggtcgttcggaattcacttattacccgacaatctgtactgatccctccttttgtatcattgaaattgaaagagccaaactatcagttcccaaatcagaatgctacacttttgttaacagtgacattctgttgttaacagtgacattctgcaaacgttcatctaaacggtgttgtcagttttcaggagctgcaaaacgaggcacccgataatccagaaatgaaagatttccccttaagagtggttaaaaagtaaaacccagccaggagtggcggctcacacctgtagccccagcactttgggaggccaaggcagcaggattgcttaagcccaggagtttaagaccagcctgggaaacataatgagatctcgtatctacaaataagaaacaaattaaccgcgtgtggtgacatgcccctgtggtccgagctacttggaaggctgaggtgggaggatcccttaagcccaggaggttgaagctgcagtgagccatgaatgcgctactgcactccagcctgggcaacaaattaagatcctgtctcagaaaaataaataaataagttaaattaaaaacaagtacccatgtatgacacaccaaagtttataaccatatggtatgacctaaaagagaggagaatgctcccagattaggacttgatagtaactataaatgttgtaacacagttaacaaaaaaaggggatgcacagaaaaaggagtgtcaaggcactgcttttcctaatacagttcaaagaaggaacttttttgttgttgtcgtccaggctgcagagcagtgatgcaatcacggctcactgcagcctcaacctcctgggctcaagtaatccccctatctcagtctcccgagtagctggggccacaggtgcataccataccaccatgcctggctaatttttttttttttttttttttggtagttggctgagtgtgatggctcactcctataaacccagcactttgggagggttaatatcctgtctctatttattttttaaattaaatttattaaaaaatttttaagaagttaaattttttgtagagatgagggtcttatcatgttgcccaggctgttctcaaactcctgggctcaagcagtcctccagcctcagcctcccaaagtgctgggattacaaacgtgaggcaccaaagcccagacccaaggaaggaacttttaaccatcttccttatgtggcagttatagccaatggattctagcatatgagttcaacagctaagtccatggtctattttaagaaggttgtcttaggccacactttactctgatataatcaactacctaacacccatgttgtgagtccaagccctttttttgttttttcttctgagacagggtctcaggctagagtgcagtggcgcaatggtggctcactgcaacctccaccttccaggctaaagaaatcctcacctcagtctccggagtagctgggaccacaggcacgcaccaccatgctgggctaatttttatgttttttgtagagccaggatttcaccaagttgcccaagctggtctcaaactcctgcgctgaagcaatccacctgccccggcctcccaaagtgttgagattataggcgtgagccaccacaccaggcctgagtccaagctcttgacaaacccctttgagaatgagctaaactcattcaaggattctagatcctgagaaataacagcactgttaattcattaacagaatgttaataaattggcattctagcttgaagctccagactcatgagtcagctctgacaaatgaatccattcttggtggtcttggagtcaaatctcaggatcacactctggattgtggtaaattcaccaaaagccctctcaggagccccctggtcatgagctcactgtaactgaggaaaggtaacttttatctttacaagaattgaaaacccagcaatctgactcaatggagagaaaaattccaagaagcaatgccatgtggtaagaaagaagagaccttttttcaaaatgttaaaaagtaagtttagactttgatcatctaacaatcttaaagtcacatatctgtatgcattccttactttcccttttctgaaaattctctttggaacctagtgtttgaaattaagttcttggcaagtcacaagaaaattgacataactcattaataaatgcagtctcattttcctaatgagaagagactctacctttagacctgttttaaatggtttctccttggttccatctcccgtggcatcgcttccctctcggtcagagacgtacagctctgctgtttgacaaaatgagggtaagttatggtctggccattaactattagtcaccttactactttattcattccttatctttgtaaacagaacaagcatcgattaataaaaattgaggtccataagtaattaatatcctagttatttccccactccatttcaataacatccatctcataaaaacattagttaataatccaggttttcaaaatgaactctgatcattttaatttgtgatatttattctatctaattgggcacccaaaaataaaatatgggctttgaagttgatcagacatacgctggaatgttggattttgtaccttaaaaggcagggtgactctggagaatttacttaacctttctgagcttatttctttacctataaaataggaaaaacaatccccatcttgaaaggctgtgctgaggatgaaataaaataacacatacaaatcagatatcccagtgccagtttttgtagagatggcaaataaacaccagctccctctggactttaaaggaaacagaagctctgaggttagaaaatttcagaaggcctcacaactagtaggtctgaacagttaacatccatccaggtctctctctttttttttttttttttcctactgcacagtatggtctccccggaaacctcaataaaaaaatgagggtgggagaaaaacaactagaatcctaaagccccttcctgacgatcactttgaagaactgcaggagtaggggctaccctgtgtctgaacccgtcccagcgcctgagtctcagcgcaatcgggaggtttcgcagcggggcaggggaagggcccggagccaccgccatcgcagcccgggggaacgacggactcggggaagcccggcctggcccttcaagtcccgggcccagcaaaggccagcaccctccctccctccctccctgcaatcggtccccaaacattcgcggggcgcccactctggtaggcactaaggaaagcgccgaaacccgactggagcagagttcctgccccaggcagggaacaccgcgccatacactgagtctcacccacctagcaccatgcctgcagtggccctggtcacctccaaggacacagactgcaacaccgacgccgtcttatgactccaacgtgcaccggcggtttccgcgattccggcgttgcatcagagagcgtagatctgagggcgcctgcgagaatcggccgagcgccgcggttccattggttacgagaggtgggcgagcggcgccggggccgccatctttggtgagggcagaggcaacttccggatccagagacgccccgccccacgcgtttgtgcagctcggaaggcgctgcctgtcccggagctccgcggccctggagaccctggcacagtgtcacttttgcacccttccttccccgcctccccaactttcctttctgaatcttccaattccgccccagctggaggcgtgcgggtcctcttgcaaaccagaccaaggatgtcgccccgatccccagatggtggaggctggttgagttcatgtcaccagcaaacaccgcgccagctgcgagacggggtgcgcggcggtggaggggacgcagcgggttgcgtaaacttccttttttttttttttttttttgagacggagtctcgctctgtcacccaggctggagtgcagtggcgcgatctcggctcaccgcaccctccacctcccgggttcaagcgattcttctgcctcagcctcccgagtagctgggattacaggcctgtgccaccatgcccagctaatttttgtatttttagtaaagacggggtttcaccatcttagtcaagctggtctcgaactcctgaccttgtgatccgcccacctcggcctcccaaagtgctgggattacaggcgtgagccatcgcgcccggccagatgcgttaactttctaaactccgtgagccagcgtccctcggtgttcaggagaggagctatggtatatgttcatttaaaattgtaaggattaccgttaggaaggccataataatgtggtggaaagaacgagggcttcggaatacaaacctgggttctgccttttactaaccgtgtgtcttcagataaattacctaaactgaatgagcttcattcagcgagttgggaccgattgcagggagggagggagggtcctggcccttgctgggcccgggacttgaagggccaggccgggcttccccgagtccgttgttccccgggctgcgatggcggtggctccggcccctgcccctgccccgctgcgaaacatcccgattgcgccgagagtcaggcgctgagaggggtttatctgtgtcttcagataaattacctaatctgaatgagcttcagtttttctatttgtgaaagatgatataaattcactgcccgggcatgtaagaggtgctaataaagggtctgtcatcattttcaacttttttttacttttttggtgggctttttttttttttggagactgggtcttctctgttgctcaggctggagtgcagtggtgctatcatagctcacggcagcctcgaactcctgggctcaagtgagcctcccacttaagcctcccaagtagctgggactataggtgcacgccaccacgcctggcttattttatttttatttttgtggagatgggggaggggtctccctgtgtcgcccaggctggtctccaacttctgggatcaagtgatcctcctgcctcagcctcccaaagtgctggtcttacaggcgtgagctaccacgcccagcccattctcaatttagtggaataccagagtttgtccctgaagcaaaagaaaaccttttttttatgagaggtcctcaaaaaaataactctatatataggttcagggcccatcaagaatatgaaccaagtccgggcacagtggctcatgattgttatcaatcccagcaccttgggaggttgaggcgggtggatcacttgaggtcaggagttggagaccagtctggccaacatggtgaaaccccgtgtctactcaaaatacaaaaattagccgggcgtggtggcacgcgccagtaatcccggttactcaggaggctgaggcaagaaaatcacttgaacccaggaggcggaggttgcagtgagctgagatcgtgccactgcactccagtctgggtaacagagtgagactccatctcaaaaaaaaaaaaaaaaaaaagtaccaaatactattcctaaggaatatttcacccaattttatgaactttcccttttcctcttggctgaatgttttctgttggctcatggattagtatcaattgctacaaagcaaattttcccaaaccttagcagcttaaaaccccgaacatttattaccttagcagtttcttttgagacagtctcagttctgtcgcccaggctggagtgcagtggcgcgatctcagctcactgcaacctccgcctaccagattcaagagattctcctgcctcagcctcccgaggagctgggattacagacgtgtgccactacgcccagctaatttttgtattttgagtagacatgaggtttcaccatgttgtccaggctggtcttgaactcctgacctcaagtgatctgcttgcctcggcctcccaaaatgctgggattacaggcctgagccaccatgccaggccctaccttgcacagtttctgatggtcaggaataaggtagtgggttagctggaggttctggctcaggtctctcatgaatcatgctgagggcagggtctgtagtcatccgaaggcttgggtgggtggggatctgcctccaggctcactcacaagctgtggtcagaaaacctttccttgccaggtgggctcccgatagagctgctaatgacagccgctgacttcacctaaagcaagtgatcagagagagagaatattagttaccttttattttataataaattaccccaaaacatcaaatggcatttgttatctcacatttctgtggaataggtatctgggcacggtttagctgaggactcagagctgagtccttccagaggctgcagtcagcttaagttgagattcttaagtctcacctggagtggatccccttccacacacactcaggtgggtgttggccagaggtctccctcaattctttccacacgggcctcttgcttggctaaagccagcaaccaagatggaagttagaacctttagttgcctaatctcacaagggatatatcccaatacttttgccatattcgattaattaggatcaagtcacttggtccagcatacactcaaaggaagggtattacacactggcatggatgccagcagctgggaatcatgggccatcttagaaagctccccactgcagtgaccaaaactgaggctgcagtgccttttctaacctgacttgttaggtgaaatgtcattgtctctgccatattctactggtcacacagaccagccctggaggtgaatgccaggaggtgttgctcactgggtaccatcttagaggctgcccaccatagcctgtccagatgaatttctccacttcatcctgctccgccccagaggctgactcatgtgaaccacatcaatgggctccctcgttctctgactcctggtcagctgcagccaatggggaacacttgtggaagaacagaggtgggatgtgaggttggggtccttattcccgtagctcctcattgtaggctggctgcatcctcacttgagggccaccgctcctgccaggtggcactgagagattcatctgaactgcccttggtgaatttagtttcatctgatcgttaaaactgaatttactggccaggcacggtggctcacctttgtaatcccagcactttgggaggctgaggcgggcagatcacttgaggccaggagttcgagaccagcctaggcaacatggcaaaaccccgtctctattaaaaatacaaaaattatctgggtgtggtggcatgctcctgtaatctagctactcaggaagctgaggcaggagagttgcttgaacctgggaggtggaagttccagtgagccaagatcaggccactgcattccagccttggtgacagagtgagattctgtctcaaagaaaaaaaaaaaaaaagtgaatttacaaagcaacattctgttgtgaaataaaaagtgtacataggactgtgcaagcaggttgtacaagagggtcatttaaattcctacccccgcctcagtctacacctatagactcataggatttctctatgtcaagttagtgcaggatggaaaaaatgggcctagtgttgacatctgcataatatgctggcacatgccagatatgaacagccattctactctagccttacttaggagaaaccctaaaaagacagtggggagggtgggcaaggtggctcacacctgtgatcccagcactttgggaggccgaggcgggctgatcacctgaggtcaggagtttgagaccagcctggccaacatggcgaaaccccatctttactaaaagtacaaaaattagctgggcatggtggcaggcgcctgtaatcccagctactcagggggctgaagcaggagaatcgcttgaacccgggaggcggaggttgtagtgagcctagatcacgccagtgcattccagcctgggcgacaagaaggagactccgtcacaaaaaaaaaaaaagaaagaaagaaaagaaaaagaaaaaaagaaaaaaaagaaaaaaaaagaagtggtgaagggaagtcatctcagatggtggaactctgagcactgtgcctggttttccacttctcagctaagtagggatggcctgaaggaccaggctggcaatagtggctcacgcctgtaatcccagcactttgggaggcctaggcaagtggatcacctgaggttggaagttcaagaccagcctgaccaacgaggagaaactccgtctctactaataatacaaaaattagctgggtgtggtggggcatacctgtaatcccagctactcaggaggctgaggcacaagaatcgcttgaacctgggaggcagaggttgcagtgagccaagattgcaccattgcactccggcctacacaacaagagcaaaactccatctcaaaaaaaaaaacaaaaaacaaacaaaaaaaggactgatggacactggctcacgggttggccagttgatcagggactaagaaagaacaagattaaagattaggtacaggaggtctgctggggatgtggatggacctttttgaatgggcactgaatgtgaagacttcttgtcctctgcaaacatctatcagaaggcatttggtatggaggaggtctctgtcatctctggatgttggacttttcctcccaaaacatctcagttcttgctcaaagagcccatatgtgaagtggctatagtaacaggatagaggctatgcatgtgttcaacctcataaactgcccttcatcctggctgatcttgctggccactgtcactgttaagtacccaacctgccaacagcagaagccaactttgagaaactgacaggacacgattcttttttttccttttttctctattcttctcttttttttttttttttttttttgagacggagtcttgctctgttgcccagggtggagtgcagtggcgtgatcttggctcactgcaacctctgcctcctgtgttcaagcaattctcctgcctcagcctcctgagtagctgggactataggcgcccaccaccacacccagctaatatttgtacttttagtagagacaggatttcaccatattggccaggctggtctctaattcctgaccttgtgatccccccacctcggcctcccaaagtgctgggattatagacgtgagccaccgcacctggccaggacacgattctttagggagaccagctggccacttgacggcaagtaaattagatcagactcctggaggaggcagtaatatgcctcccaggtatagactcagtccacacagggatgcgccttctctgcctgcagcacccacatctatggacttacagaacgctgcatgtgtctttatggtattcagcatctctcaccccaggacacattttcagtaaaggaagtgtgacagtgagctcatacctatggaattcagtggtctaaccatgttctttgtgttagattattatttaaaataatcagacatgcttctgtgaacccagaaaatcagagacaggtctcagttaatttagaaagtttattttgccaagattgaggatgcatccatgacaccgcctcaggaagtcctgacgacatgtgcccaaggtagtcgggcacagcttgcttgtatacattttagggagacacgagacatcaatcagtagaagaattacattggttaggtctgggaaggcaggacaatttgaagcaaaggcaggaagacttgaagcagggagggggtttccaggtcacagataagtgagacacaaatggttgcattcttttgagtttctgattaggctttccaaaggaggcaaataagatgtgcatctctctcagtgagcagagggataactttgaatagaatgagaggcaggtttgtcttaagcagtttccagcttgagttttccttcgtaaaaaggaaaatattttgggggtccaagatattttcctttcacactcccttctcccatacagaaggaatatacttccctgcttcatttctgctgggcttagccatgtgcatttactttggccataggatattggcaggtgtgatgcaagcaaaggtttacaatgtgtttgtgcagttggacttgtgttcttgcttctgccattgttagagaagccgaggcctaggagggccagagtgacaccattttaagttgagctccatcttgagactccttgccagtcacaacccatggtcataagatgtttacagttgagaaaacagcctaaagatacctgcaaggacacaatcctgtaacaacagaaagaccagatgtcccaatacccgtaatatatgctttcaagataattatagttatgctttaatgtacttatacactaaaatgtcaaggagagttttctttaaatcaataaaataataaattttgtcatgctgtcagaccacatgcacaaagacacagcttagtttagcctttacatagacaaaacccctatatatcaaatttttttttttttcagacagagtctcgctctgtctcccaggctggagtgcagtggcgcaatctcggctcactgcaagctccacctcccgggttcacccattctcctgcctcagcctcccaagtagctgggactacaggcgcccaccaccacagccggctaattttttgtatttttagtaaagatgggggtttcaccgtgttagctaggatggtctcgatctcctgaccttgtgatctgcccacctcggcttcccaaagtgctgggattaggcgtgagccaccgcgcccggcctatatatgaaaaatttaaaatggccaggcgcagtggcccagcactttgggaggcgaggcgggtggatcatcctgaggtcaggagtttgagaccagcctggccaacatgcgaagccctgtctctactaaaactacaaaaattcaccaggcgtggtggcgggcgcctgtaatcccagctactcaggaggctgaggcaggagaattgcttgaacccaggaggcagaggttgcagtgaaccgagattgtgccattgcactccagcctgggcaatagagcaagagtccatctcaaaaaaaaaaaaaaaagaaaaagctaaaacaaagacggggcattcctttgcttgcttcctaaggacgccctactctgtaatggaggcgctttcaataaactctcaccgtaccctgcaacttgtcttgaattctccttcctgcgtgtaattcaggaggcctctcttggggtctggatcaagaccgctttttctgtgaacaaccaccatgagaagaacacgccctgactgacccactggtccagggaagctgagacatggagaagacagggacccaatcttcagcttggagacacgtccagctgaactcagcccacatcagtgacctgcagatgcataagtgagaataaacgattgttgggttacgcctctgagtttgggaggcattttgttacacctctttagtgtggcaatagtagactaataatacatgctctattatgcagaagtgtgtggcttaaaataatagttgaatgaccaggtgcggtggctcaggcctgtaatctcaacattttgggaggccatggtgggaggatcacatgaggccaggagttcaagaccagcccgggcaacatagtgggacccccgtctccataaaatttttaaaaaattagcctggcgtggtgggcgcacgcctgtagtcccagctactcgggacggccagaatgaacggcattatcgtctgtctcttcattctgattctggccagcaaggggtggcctccccctgcggtccttgctgttaggtccctgcgccccctcagctttgcgctgaaggtcgctttaccggaccccacttcgccctaccaggcgcaggatgagcgtctctgttcttttaatgtggcgtcccccacaggccaccgtaccaggccgccggtccggggttagggcacttgacgccggcgccgccatgttgtctccgggccacttccgcgtttctggcgcgtggtcttgcatttcctacttggtcctgttcgtggcgccgcgcctccgggtgttggggagtccgggatgatggggaatccggggctcgccctagtcgcggggacaccgccttccaggagctgtccccaggcaaactcacagacatcttcaaagagccttcttggacattctgctttttgctcctcataacaggcttcggtaagagaacaggcaaacatcactgcgggcgcctctagggctcgtttccctgtcccagtaccgggaatcggggaggggtccaagcagagttcacttagttaacaaatcagtgaagcagttggaaaatctcagttatattttaaatgagatcgagggcggtgactcacgcctgtaatctcagcactttgggaggccgaagcggaggtggagggtcgcttgaggccaggagttcgagaccagcctgggcaacgtggtgagccacccccgcccccgcccctctataaaaaatacaagaattagccgggcttattggcatgggattgtggtcccagctacttaggaggctgaggtgggaggtcgcttgagccatggaggtcgaggctgcactgagctgtgatcacgccactgcactccagcctgaggctacggagagagaccctgtctctaattaataaataaattatagatagatgatagatagatgcaataaaaaataaaattggcttgtaaacggcaaactaaaagtggaaattatcattacaatgaaaatattaatttgaggaaccgaaaacttaactttccttttcctgtagttaagtttaagcacttagatttgcttcagtgattcccaggcttcatgattgcaagctgcttgcttgtaagcaccttgtctctcactaaaaaaaattacagttattttaaagtcccgctggatgctcattctttaaggagggtgaacaatggtaactcctgtaccgttagagctctgaatgaagccagatacgttccatagatcacagaactcattttctggcttggtgagcctggtcaagtttcttaacctttctgagccacagatgtttcaattataaagtgataataacccttcactgggaaggttattgtgaggataatatgagatcagctataccaaaatatgcctaacatgtacttgacatccagtaagctttctgaattaggatataaatggcattaatggttaatcattgttattcttttgttccatgatatgcatgaataacaacttgaagccttcaaactgctgagagctgcttggtggacctcgtctctcaatttgcccttcccactaaacctgtcttcccccaacagtgggctttctggtcagcatttcagaatgtctcaaaccgtaggtccttcccacagccccaaatctcagcaaatgaccagtctcttgcttcaagctattaaatggatgctgtctgacagccctcccttgaaacctgcaaactctcgtgctttggcatccatcctttccctctagtgcaatgcaagtcacatcctccctctggctaacctctccacccatcttctggattccccacacctctccaatctaatcttcacactccagccagggcgaacacttacaaatataaacacagtcatttcattctctatctagcaactttccatggacttccttttgctctcagggttcacctcaacatccttacaggctttccaggctgtgtatgctctggcttaccactgcttcttatttttttttttattatttatttatttatttatttattgattgatcattcttgggtgtttctcgcagagggggatttggcagggtcacaggacaatagtggagggaaggtcagcagataaacaagtgaacaaaggtctctggttttcctaggcagaggaccctgcggccttccgcagtgtttgtgtccctgggtacttgagattagggagtggtgatgactcttaacgagcatgctgccttcaagcgtctgtttaacaaagcacatcttgcaccgcccttaatccatttaaccctgagtggacacagcacatgtttcaggagagcacagggttgggggtaaggtcacagatcaacaggatcccaaggcagaagaatttttcttagtacagaacaaaatgaaaagtctcccatgtctacctctttctacacagacacggcaaccatccgatttctcaatcttttccccacctttcccccctttctattccacaaaaccgccattgtcatcatggcccgttctcaatgagctgttgggtacacctcccagacggggtggtggccgggcagaggggctcctcacttcccataggggcggccgggcagaggcgcccctcacctcccagacagggcggctggccgggcggagggctgacccccccacctccctcccggacggggcggctggccgggcagaggggctcctcacttcccagtaggggcggctgggcagaggcgcccctcacctcccggacggggtggctggccgggcagggggctgacccccccacctctctcccggacggggcggctggccgggcggggggctgacccccccacctccctcccggacggggcggctggccgggcagaggagctcctcactttccagtaggggcggccgggcagaggcgcccctcacctcccggatggggtggctggccgggcagggggctgacccccccacctccctcctggacggggtggctgccgggcggagacgctcctcacttcccagacggggtggctgccgggcggaggggctcctcacttcccagacggggtggctgcccggcggaggggctcctcacttctcagacggggcagctgctgggcagaggggctcctcacttctcagacagggcggttgccaggcagagggtctcctcacttctcagacggggcggccgggcagagatgctcctcacatcccggacggggcgacagggcagaggcgctccccacatctcagacgatgggcggccgggcagagacgctcctcacttcctagatgggatggcagccgggcagagacgctcctcactttccagactgggcagccaggcagaggggctcctcacatcccagacgatgggcggccaggcagagacgctcctcgcttcccagacggggtggcggccgggcagaggctgcaatctcggcactttgggaggccaaggcaggctgctgggaggtggaggttgtagcgagccgagatcacgccactgcactccagcctgggcaccattgagcactgagtgaaggagactccgtctgcaatcccggcacctcgggaggccgaggctggcggatcactcgcggtcaggagctggagaccagcccggccaacacagcgaaaccccgtctccacccaaaaaatacgaaaaccagtcaggcgtggcggcgcgcgcctgcaattgcaggcactcggcaggctgaggcaggagaatcaggcagggaggttgcagtgagccgagatagcagcagtacagtccagcttcggctcggcatcagagggagaccgtggaaagaggggagagggagagagagggagagggagagggagagctgcttcttatttttatttattttatttatttattattattatttttttgagacggagttttgctcttgttgcccaggctggagtgcaatggagcgatctcagctcaccgcaacctccgcctcctagcttcaagtgattctcctgcctcagtctcccaagtagctgggactacaggcatgcgccaccgtgcccagcttattttgtatttttagtagagacggggcttctccatgttggtcaggctggtcttgaactctcgacctcaggtgatctgcctgcctcggcttcccaaagtgctgggattacaggcgtgaaccaccacgcccgactattttttatttgttcttttgagacaggggtgatcctcccacctcagcctcaaaagtagctgggacttcaggcacacaccatcacacctggctaatttttttttttttttttttttgtagagacggggtttgggggttttgccttgttgcccaggttggtctcgaactcctgggctcaagggatatgcccaccttaacctctcaaagtgttaggattacaggtgtgagccactgcgcccagccctattgctttttaaaggtacaattaactttagcccaggctagctttttcactgaattgatctgggtacgatgtggggtttgggatagctgttcagaaaggtgaagacagagtcaaagagagaaaaacattttctctatagaggtggggaaactttcagagagaattaattgtgtcctctaaaagcaatgaagtccgcttggttagtttgaagaacgatcatgtatcagtttataggaattgagacttttttttttttttttgagatgaagtctttctctgtcccccaggctggggtgcaatggcatgatctcagctcactgcaccctccacctcccaggttcaagcaattctcctgtctcagcctcccaagtacctgggattacaggcgcctgccaccacgtctggctaatttttgtatttttagtagagatggggtttcaccatgttggacaggctggtcttgaactcctgacctcaagtgatccgcctgcattggtcccacaaagtgctggggttacaggcgtgagccaccatgcccggccggagttgaggctccaaggggtctcggggggtctcagaagctcagctgatgatatcttaatcaggtttgggtttttttttttttctgttagaacaggtcataaaaatactttcaccccaagccacaaaatcctataaaatagctcagtctttgacaaatacagtgaatataaaagagctcttttgagtttctatttactcaagatgtttgcagtgataaaatcttgatataagttttctagaatcttgaactttcaaagctcctttagaaacagtcctttgtgttgtttttattaaactcttcaatgaacacaaagtttttatgttgttcacacaaaatttaaataaggaagctgaaggtaggtgggaacccccaaatggatggtaatagaaaacctcctatagcatttccatagactggtttattcattatgcagcttggctcagcagaaccattttataatgaaactgcaagatgactcccagtgggcaaatcaacctctattctaaaggttgattcttgtcaactgggagaattgattcctgatgagaaatgctagactaaaaaaccctcccacattcacttcacaagccagatccaatatctttaatcctcttatggaaaagaaacaaggagacatttcagggcttacaacagccttccagaataattgcaacagtctcacagcatcaggggccaaaggaatattgacatctttccaactggaaatcctaaaccggttatctggagtgagacaatctatgtcttaaacttggccagagcaccttggattttttttttttttttttttttttttttttttttgacggagtcttgctctgtcccccaggctggagggcagtgatgtgattttggctcactgcaacctccgcctcctgggttcaagcgattctcctgcctcagcctccccgtagctgggactacaggcatgcgccaccatgcctgggtaatatttttgtacttttagtagagacagggtttcaccatgttgatcaggctggtctccaactcctgacctcaaatgatccacccacctcagcctctcagcgtgctgggattacaggcgtgagccaccgcgccaggccagcaccttggattttaaccaccatcctagatcaggaagtttaaatttctctccatgttaaaattttcctttctcatattgttaatacattactatttgattaatacaaattactatttgttaatacaaatacatgctatttgattcaggttttgaagcaaaattcctgataattttaaaactatgagagttatttctttctatgcatcttattgctgaggtcatcttagctgatcattaattggacaatatagtggtaaatccatactggtctttgactctgaaaacattctttcaaattccattggtgctttccactgttttgacacgactttaagatgttatccagactcttctgagcgcaaagaatatgtgtctgcatataaatggcctaacaaaacacaccactctgtctatagccatgaacaggaagtccccatctctgggcactgccagtcacccaagaggacaatgtgaagagctggggttgctgctctagggagaagcttgtgggcttgggcgagtttcagtttgggagtctttgtgacttaagcaggaaaaatattaactcagattactccctttggcctaaaaatcatttctattttttattgtttaatttttgaaatagaaaatgtattcatatggttcaatatttttaaagtatgaaaagataattcaatatttaaaagtctcactcctcataacaactgtagtctctttttttttttttttgagacggagcctcactgtgtcacccaggctggagtgcagtggcgtgatctcggctcactgcaacctctgcctcccgggttcaagtgattctctgcctcagcctcccgagtagctgggattgcaggcatctgccaccacgtccggctaatttttatatttttagtagagacggggtttcaccatgttggccaggctggtctcgaactcctgacctcgtgatccacccgcctcagcctcccaaagtactgggattacaggcgtgagccaccgcgcctgccctactagtctcttttatatctagagattcttgttgaaaatatgactatattcctctaaatctacctcctttattccttcccttaaaacggcctttttttttttttttaggcataaataatatacaacagcctgggcactgtggctcatgcctgtaatcccagcactttggaaggctgaggtgggcagatcgcctaaggtcaggagttcaagaccagcctggccaacacggtaaaaccccatctctactgaaaatacgaaaattagctgggcatggtggcgcatgcctgtaatcctagctactcaggaggctgaggcaggagaatctcttgaacctgggaggcagaggttgcagtgagccaagattgtgcccctgcactccagcctgggcaacagagaccgcatctcaaaaggaaaaaaatatatatgacaaagtgtacacatttaaaatgtgcaatttgatatgttttaacatatgtgtatacctgtgaaaccatcaccacaattggggttagggaaaaaatccatcaccccaaaaagttttcttttttttttttgagacagagtcttgctctgttgcccaggctggagtgcagtggcctgatcttggctcactgcaagctccgcttcccaggttcatgccattctcctgcctcagcctcccgattagctaggactacaggcacccaccaccatgctcggctaattttttgtatttttagtagagacggggtttcatcgtgttagccagatggtctcgatctcctgacctcgtgatccaccggcctcagcctcccaaagtgctaggattacaggcgtgagccaccgcgcctggcctaccaaaaagttttctcatgtatttccctagtgactaatgatgttgagcatcttctcatgtgcatttttgctttacctgtatcttctctgttgaagtatctgttcagatcttttgtgaggacaaggtacggggttccaggtagggatccaagttcattttttcgcatgtggatatcaaatgtcccggcaccatttattgagatggccatcctttctctacctcatcgcttttgtaaccttgttcaatatcagttgtccattgatgtatggatttatttatggactctattaggttccattgatctatctgccctctttaagccaatactatgctgttttgattgctatagctttataacaattttctcttttttggccctaatttcacatttattttatttttaaaattttgacttttattatagactaaagggtatatgtgcagctttgttgcatgggtaaatcgcatgactctgaggcttgaggtcccagcgatcctgtcccccaggcagtcagcatagtacttaactagtcgttcttcagcccatgctggtaacaactttcaaaatcaagtagtgttcttcctccaactttgtttttcttctgcagagttattttggctattttaggtcctttgcatttccagatgaattttagaatcagcttatcaatttttaccaaaaaaagaatctcatgggatttcaattggaattgcattgactctacacatcaatttaattgcctcctcttgtttcttttttatatgaaaggttgtccccatacacacagttctgcacctggctcttcacactccacaatgaatggagatctttcattcttctcccttagctcccattatagtttcattgtatccttttgttgggatggaacttatttcatttaactgtagtgaaactgatggattgctagcttactgctgatattttgctattacaaacagtgctgcagtataatcactgtacgtgtcatttcccttgtgggcaaatatatctgcaggatgaatttgagaagtgtgattgccaggtcaaagggaatatacatttaacattttactggcaagggccaggtgcggtggctcacgcctgtaatcccagcattttgggaggctgaggcgagcggatcacaaggtcaggagattgagaccatcctggctaacacggtgaaaccccatctctactaaaaaaatatacaaaaaattagccgagtgtggtggcacccgcctgtagtcccagctactcgggaggctgaggcaggagaatagcttgaacctggggggcagaggttgcagtgagctgagactgcgccactgcactccagcctaggtgacagagctaaactccatctcaaaaaaaaaaaattaatggttatggctaaatcctttcctagagtttcataatttatatacttttcattaatacattagaaggcttgttttgccatagccttaacagtgcattaccaaactttcttgtttttgccaaattaataggtgaagatggcctatcaaaatcattttgattttcacttctttatttcaggtaagtttaaacattgtttcatgtgttgaagagccatttgtatttctttcttttttttttttttttttttgagatggagtctcgctctgttgcctgggctggagtgtagtggcgcaatctcagctcactgcaagctccgccttccgggttcacgcgattctcctgcctcagcctcccgagtagctgggactacaggcacccgccaccacaccttgacagggtttcaccgtgttagccaggatggtctcgatttcctgacctcgtgatccgcctgcctcagcctcccaaagtgctgggattacaggcgtgagccaccgcgcccagctgtatttctttttttgagacagagtctggctctgtttcccaggctggagtgcagtggtgcaatctcaaatcactgcaacctccgcctcctaggttcaagtgattctcctgcctcagcctccctcgtagctggcactatagttatacacccagctaatttttgtatttttaatggagacagggtttcaccatgttggcctggctggtctcaaactcctggcctcaagtgatacgcccaccctggccttccaaagtgctgggattacagggatgagccaccgcaccccgccccattgtatttccttttttctgactttttgttttcacaaccttggctgctatggtctgaaggtttgtgcccccttaaaattcatatgctgaaatcctaacctccaaggtgatactaggaggtggagacattcagaggtgattaaatcaggagggattatgtctttataaaatagtcctgaaggagcttgttggccccttccaccacgtaaagacacagtcagaaggcaccatttgtgaaccagaaagcatttcctcagtaggcaccaaatctgtcagccccttgacctaagagttcctagcttctgccagaactgtgagaaaaaatttctgttgcttatataaaccacgcagtttgtggtattttgtcatagcagcctgaactaagactcgcacactttttctccattttgccatctttgcttataccttttttctttttcttttttttttttttgccataatggaggttttaaaaatatttatgcatttgaaattactagcctttcctttgaggctttagatttttagtcttaattagaaagtctttccccactccagtatttgaatttcctcgtgattttcttcaaatactttgatgagtttttttttcttttacattgaaatctcttcattatttggagcctattctactacagtgcatgatatctaatttgtttccctgttgtctcaacaccagtccatctttccccccacccacctttgatgccactttatatagtaaatgttcacgtgtttgaggctatttctggatttttctgttctgttccatggaatgtctgtgtaatcatgcatcagaaccacactactgaaactgtttttcaaattataatatggcgtaatatctggtaggagtggtctcacctcattgcttagttttctgacattaatttttccatatgaactttagaatcagcccattacaggaaactgtttgcatttttatgaggattatatgccatttttaagttattgtaggaagaatcaaccctttctagtgtgatttttttttctttttttctttgagacagagtctcactttgtcacccaggctggagtgcagtgatgcaatctcagtttaccacaacctctgcctcctggattcaaatgattctcctgcctcagcctcccgagtagctgggatgacaggtgcatgccaccacgcatggctaatttttgtatttttagtagagatggggtttcaccatgttggccagtctagtctccaactcctgacctccggtgatccgcctgcctcagcctcccatagtgctgggattacaggattacacggtggtgcccggcctcagttttgacgactttccctgatgactaatgatgttgagcatctgttcatatgcttattgaccatttatatcttttttttttttttagatggagtttctctcttattttccaggctgcagtacagtggcgtgatctcggctcactgcaacctccacctcccaggttcaagcgattctcctgtcttagcctcacgagtagccgggattacaggcacatgcccccattcccagctaatttttgtatttttagtagtgacggggtttcatcatattggtcaggctggtctcaaactcctgacctcaggtgatccgcctcggcctcccaaagtgttgggattacaggcgtgagccacccactgtatctcttgttcggaggaatatctaatcaagaaaatcatttttactgtttttattttttggtttgttcgtttttttcctgtgagatggagtttcactcttgttgcccatcctggtgtacaatggcgcgatctcggctcacttcaacctccgcctcccagtgcgtccggaattggtgggttcttggtctcactgacttcaagaatgaagctgcgcaccctcacggtgagtgttacagttcttaaaggcggcgtgtccggagtttgttccttctgatgttcagatgcgttcggagtttcttccttctggtgggttcatggtctcgctggcttcaggagtgaagctgcagaccttcgtggtgagtgttacagctgttaaggtggcgcgtctggagttgttcgttccttccggtgggttcgtggtctcgctagcttcaggagtgaagcttcagaccttcacggtgagtgttacagccgttaaggtggcgcgtgtggagttgttcgttccttccggtgggttcgtggtctcgctagcttcaggagtgaagcttcagaccttcacggtgagtgttacagccgttaaggtggcgcgtgtggagttgttcgttccttccggtgggttcgtggtctcgctagcttcaggagtgaagcttcagaccttcacggtgagtgttacagccgttaaggtggcgcgtgtggagttgttcgttccttccggtgggttcgtggtctcgctagcttcaggagtgaagcttcagaccttcacggtgagtgttacagccgttaaggtggcgcgtctgcagttgttcgttccttccggtgggttcgtggtctcgctagcttcaggagtgaagcttcagaccttcacggtgagtgttacagccgtgaaggtggcgcgtgtggagttgttcgttccttctggtgggttcgtggtctcgctagcttcaggagtgaagcttcagaccttcacggtgagtgttacagccgttaacgtggcgcgtctggagttgttcgttccttctggtgggtttgtggtctcgctagcttcaggagtgaagcttcagaccttcacggtgagtgttacagctcatagaggcagtgtggacccaaagagtgagcagtgacaagatttattgcaaagatgaaagaacaaagctcccacagtgtggaaggggaccccagtggattgcctccgctggctcgggcagcctgcttttattctcttatctggccccacccacatcctgctgattggtccattttacagagagctgattggtccattttacagagagctgattggtctgttttgacagggtgctgattggtgcgtttacaatccctgagctagacacaaaagttctccacatccccactagattagctagatacagagcgtctacacaaaggttctccaagtccccaccagagtagctagatatagagtgtcgattggtgcattcacaaaccctgagctagacacagggtgctgattggtgtgtttacaaaccttaagctagatacagggtgccgattggtgtatttacaatccgttagctagacataaaggttctccaagtccccaccagagtagccagatagagtgtggattggtgcattcacaaaccctgagctagacacagggtgctgattggtgtgtttacaaaccttgagctagatacagagcgctgattggtgtatttacaatcccttagctagacataaaggttctccaagtccccactagactcaggagcccagctggcttcacccagtggatcctgcaccagggccgcaggtggagctgcctgccagtcccgcaccctgcacctgcactcctcagcccttgggtggtcgatgggactgggcgctgtggagcagggggtggtgctggtcagggaggcttgggcctcgcaggagcccaccgtgtgggggaggctcaggcatggcaggctgcaggtcccgagccctgccccgcggggaggcagctaaggcccagggagaagtcaagcatagcagctgctggcccaggtgctaagcccctcactgcccgggctggcggggcccactggctgctggagcgtggggcccgcggacacccacgcctacccagaactcacgctggcccgcaagcaccgcgtgcagcccgggttcccgaccacgcctctccctccacaccttcccgcaagctgagggagccggctccggccttggccagcccagaaaggggctcccacagtgcagcggtgggctgaagggctcctcaagcaccgccagagtaggcgccaaggccgaggaggcgccgagagcgatcgagggctgtgagggctgccagcacgctgtcacctctcaccgggttcaagcgattctcctgcctcagcctccccagtagctggaattacagacgtgcgccaccacactccgctaatttttatttttagtagagacggatttctccatgttggtcaggctggtcttgaactcccggcctcaggtgatctgcccgcctgggcctcccaaagtgctgggattacaggtatgagccactgcacccagcctttactgtattttttagcagaaagaaaatgattgcattacagtggttatttttaagggccccaacctccactttgtcctgagatctacgttgtgttgttttcagtgttttaacaggcctttttatttttataaatgccccagaagttgtagcgcagccctaactttctagcaggacttttagaagctgacaattttcctaagtttcattcacatcacatgaaggcagcaattgttaaaatatatttagattccattagggtacattttgctatcacattgaagtctctcaagaatcattttattcccatcagatgttgttactgagcagtttctagtgctgaacatgactaagaacctttaggtggtgctctttgattaaaaacatttatccctcaaacaacttaaatacagtagtatattgcaggaaaaagtgacctttatttttttagggatgatctcccaggtctgctcaatttttctgccatttctattgcagaggctaataatttgcccatctcctcccagcccaagcaccccaagactgatacttttctatcacctgctgctaattttgcctcccaaagagtctcccatctcgacgcagagagaaccttcttagtggggtcacagcttcccttgcgtccaagagctgtctgtcccacagcctggtcagactcccacagcctcgtcagactcccacagcctcaaaccccaggtttgccactcacttcctcactcactcctctttgctcatttttctgccaacgattcgtcatgtatttctaggactatctgctcacttctcaccccttactttttttgttttgttttttgagacggagtctcgctgtcacccaggctggagtgcagtgtcacaatctcagcccgctgcaacctccacctcccaggttcaagtgattctcctgcctcagcttcccaagtagctaggattacaggtgtgcaccaccatgcctggctgcttttttttattcttagtagagatggggtttcaccatgttggccatgctggtctcgaactcctaacctcaggtgacccaccaccttggcctcccaaagtgctgggattacaggtacaagccaccgtgcccagccccagtccttacttttggttgagggttacctttcctttcattctggctaaagagttgaggtcagttggaaaaacccagactcaatcttccttttttttttttttttttttggagagagtctcactccattgcccaggctggagaacagtagcacaatcatggctcactgcaacctctgcttcctgggttccagcaattctcctgcctcagctgccagagtagctgggattacaggtgtgcaccacctcacccggctaatttttgtatttttagtagagacggggtttcgccatgttggccagactggtctcaaactcctggcctcaagtgacccgcccacctcagcctcctaaagtgctgggattataggcatgagccaccatgcctggctgatctccctaactctaaatctttacccctctgtctctaaagtctggccacctttttaattcttttagagacagagtcttgctctcacccaggcttcagtacagtggcataatcgtagctcactgcagcctcaaactcctgggctcaagtgatcctcccacctaagcctcccaagcagcagggactacaggcacatgccactacactgagatgtttttttttgaaaagacagagtcttgctatgttgcccaggctggtctcaaactcctggcctcaagtgattctcctgcctcagccttccaaagtactgggattacaggcgtgagccacagtgcccggtcctgatcaccttttctccatcaccttttccctaacacttagtttccctttctccatcacttcttccctaacacttagtttccctgtccccgactttctcactactaaaggacccctacattcctctagaaaccttgtgggactagattcttctgtcacataccctattcttaaaaataacaacaacaacaaaagccaatttaaatactttagaagatcatacttttcaaagattttactaaatcatttttttaaacaaaatatacattaaatctcagatttacagaatatagaaataatttatccaaagaaatttgcatttaaaattgttaatattgcacccaacagtatgtctttgacacatttgcattgtcaatctttcccacaatttgcaaaaacaggagagaaatctgaaactaacagaattacacaagctaagttttctgtaaaaaaagaaaaaacttacaattttttatttacaagttaaggaaaagttgtaaacgttcaggattttacttccacagaataaaaagccatacattcttttatcatacctagaaaatgaacatatacacattgtgattacctcataggaattcaacaggactgatattgtgaacattcacagcccaatggtaaaaaacagaattctcgaactatggaaactagtgtgtgaaagacacagaatgagaaaaatgtctggaaaaaaattactttctcctctttgaggagtttccataattacctaaagttatcttcaaatttaaaaggacacaccattccccagtcttaggaatgtggctgccaataaccttttctctcgacataagacaagtgaaaaagagtgaggtctttgttcaagtccctgataaaatactttgcatataggcaggcacaaaagtttgctttccaaaagaaagctttgcaaaatattctgcaatttattactgatatcctcagtttttaaaaaccccctttttaagcccataaatatttatatgctttaaaaaatgagagtagggaatcaaatcatttggtactatgggaagctgctaaaataatatttgatagtaaaagtatgtaatgtgctatctcacctagtagtaaactaaaaataaactgaaactttatggaatctgaagttattttccttgattaaatagaattaataaaccaatatgaggaaacatgaaaccatgcaatctactatcaactttgaaaaagtgattgaacgaaccacttagctttcagatgatgaacactgataagtcatttgtcattactataaattttaaaatctgttaataagatggcctatagggaggaaaaaggggcctctgggaaattatgctgaagatcaccgaaaggaaaatgtaactgtaattttataatacaataccatttgaactgaaatacaacatgctttgtaattctattgccctggattgagactggattaaaacgttccctttcaaccataatgtacataaccagttgaataataggacttttattattattaaaaaattttttttgagctggtgtctcactctgttgctcaggttggagtgcagtgccacgatctcggctcactggaacctccacctcccaggttcaagcgatttccagctaatttttgtatttttagtagagatggggtttcaccatgttggccgggctggtctcctgacctcaagtgatccacctgccttggcctcccaaagtgctaggatgacaggcatgagccaccatgcccggcctatttttaaatttttcttaagacagagtcttgctctgtcacccaggctggagtgcagtggcgcaatctcggctcactgtaacctccatctcccaggttcaagcgattcttctgcttcagcttctcaaataggtgggattacgggtgcccaccaccaagcccggctaatttttaatttatggtagagacagggtttcaccatgttggctgggctggtctcgaactcctggcctcaggtgatctcccctcctcagcctcctaaagtgctgggattacagacctgagccaccacgcccggccgaataataggacttttaaaagtcctatttcttggctctgctattgtttaatagtccaacccaaggagtttgttataaagattatttattgtcttcaatatctttgtgatgaatgcaattcacacacacacacaaagtcctgagagtctttcataaaaaaatagacgtgctttgtggccgcatcccagcctgggggtaagggatcagctgtccccggtgcgcctgtactccgcggtgccatccgccacgatggcatcaagcggcgagcgcttcttgcggatgctgcgcccggaggagatgaggtccgcgtagccccgctggtgcgagaaggcgtaggccgagcgccgcgttgacacgccccggcggaacacctgctgccgtcgctgccactgctcctccgccttcaaccgcttgcgatgcttctggatctgcaagggggagagatggggagggatgaaaataagatccacaccagggaggaggcctggccagacggttgacagaaatgaacactgatgaactcccctgacacctgccccattttgatgcaggcagttctgtccccacttgtgtgtgtgtgtgtgtgtgtgtgtgtgtgtgtgtatgtgtgtctatatctttttttttgtttttgagacagtctcgctctgtcacccagacttgagtgcaatggcacgatcttggctcactgcaacctctgcctcccaggttcaagcgatcctcctgcctcagcctcctgagtaactggggttacaggcacgcactgccacacccgtctaatttttgtatttttagtggagacagaatttcaccatgttggccaggctggtcctgacctcaagtgatctgcctgcctcggcctccaaaagttctgggattacaggcatgaaccacagtgcttggctatatctatctatctatctatctatctatctatatcgacatatatatatgatgatataaatctatatccatctctctatatctatacatagattgattgatcaatcgatctacctacctacctacctggagatatatattgaagccaagggaaggttatttaacttttccaaggtcacacagctagaaaatgcaaagccaagattcccactcctctgaagctagtgcccttttctagttcagaccagatgggtacagtcaaagagaaaattcagtagggcctctttcctgggttgttactgcatactgttggcactgcaaaagggagacccgagggatactgaaggttgcctcagtagcctctactctctccttctttctaatggaaattgattgtattcagattgccccccccaacccctcacagccacatttctcatgggcggtgggcaggttgatttcccttgctaaactagtccagaatgggcaagtgacctaattttggcacgtgagacctgagggcactgtactggggcccttgggtgagaagttccacggcccctaaggagctacagaataggctcttatctccccccgacactgataggtcaggaagtgatacccagaactgctctggccatcttccagcatccatatgaagctaataatgaaggtttctgagagaagagatggcaagaaccagcccaatcctttcttgacaacattaaattgctcaatcaactgggcctgaagcctactaatgattaatgatgacgcactactgtagagatgttttgagtcacagctttctgttccttgtagctcaaaggatcctgctacagaaggtgacatttttcttaaataaagaaaaaaaacccaatctgatttgtatgacaaaatgttaatactgtaattgttaaactgaggagatagatatatggggctcattctgttctcccttttttgtttatgtttggtaatttttgtattaaaaagcaagcacactaaactcccaattccaaaagacttatttgtgagatagagttaaagagaagcaatcatgaaaaatcattcttaccaaacttcccatgagcttagaattttgcaggaaacgtgctgttgggaaacgctttggtttctgtgagggacagagttgggaaaggactatattctttataccttatcactttctgatggccagatggtcattgacaggaatcgaatggcaacgacgggtagtaagcacacagcaacagccaggatgatagttaaccaaatgtatggctgtctcagagcgtttgaagctgtgcctgtaaagaacatggcaaatgcatcactgtggttcttttttcctaagaacatagttaatatttcgccaggtgtggtggctcatgcctgtaatcctaacactttgagaggccaaggtgggtggattgccagagctcaggagttcgagaccagcctgggcaacatggtgaaaccccgtctctactaaaatacaaaaaatcagccgggcatggtggtgtgcacctgtagtcccagctactcaggagacagcagaattgcttgaacccggaaggcggaagttgcagtgagccgaaattgtgccaccgcactccagcctgggtgataaagcaaaactctgtctcaaaaataaaaaataaaataaaaaaaagaacatagttaatatttcataatctataaatagatcatttatggtaaagttttacaactggattggcctccccaaaatatccattatggctcaaagaacagacattttaaaatcagactaagcaaagcaaaattgggaaggtaaattatttgaaacaaggcaaatttacataagtgagcaaataaggaaaaaaagcacatttgttgacattgcattgattaaaaatgcaaagttaggtgatcaagacttctgacttttttttgagatagggtctcactctgttacccacgttggagtgcagtggcgtgatcatggctcactgcagcctcaacctcctgggctcaggtgtcctcctaccttagcctcctgaatagctgggactacaggtgtgcgccaccacgcttggctaatttttgtattttttgtagagatggggtttcaccatgttgcccaggctggtctcaaactcctgagctcaagtgatccacccatattggcctcccaaagtgctgggattacaggcgtgagctaccacatctagccccagtattaggttttatgggaaagaaagaataggcttttatccagccttttaagtcttaagttatctaattcaacacacgtacagcgctattgtaaagctattttaatttgtcttcctcccatcatgttatgccctttcaacccaccatcaccatttaatttccagacaagacattaattttcactagcaataataatttgtatatatttgttttgttgtgctttgttttttttgttttttttttgagacagggtcccgctctgtcacctgggctagagtacagcagtgccatcacgactcactgtagcctcaacgtcccaggtcaagcaatcctcccacttcagcctctccagtagctagaactacaggcatgtgccaccatgcctggctaatttttttgtattttttgtagagatggggtttagccatgttgtccaggctggtcttgaactgctgggctcaagcaatccacttgcctcggcctcccaaaatgctgggattacaggtgtgagccactgtgcccagccattccaccttgtatattttattacttaacagaagttatgtcaaaatctaaactaatgacatttgtctgtacatttatttttggaatttggaaataccaacctgtaaattgaaatgcagatggaaagagaacatgtattccagcactatgaaagtcaaacatgatgccaaaataaagtgcaatgcttccaaaaattgaaaaagcattcacaaaagtccaataagaagtatccaagccaatctgttgggaaaccagagaaaaacagagcactcattttggggagttagcaagaaataaaggatctaacaatcctgaaaacagaattcagcaagttaggcatgatgtggcttgaatactggaccagaaactaaaccatccttgactcaggcaagaaatagaaaatgtgcttggtataagagatgaaaatagcatttatattttgtaagtggcacaggtgcagtgggagtcaggtggatgtgcatgccaccctatatacagaaatataagtaggtaccaatagacactgaatacggccaatgaaagccacgtacctggaaattgactgttattacaagagcagaggcaatggtgacggcaaaagactggtagtcggaaggtgcctctccatcctgccctacggtttgcagataagctccaagaggtatgaagaagaggatcatcgatgttaggaccccatgcaacaagcttacaaagaatctcttatagttgaatagtaagtctctttgtcccactatgtataacccagggaatcggaggctcagtttgtcactcacatccttaaggagaaaacaaaatgatggtattttattcatcaggtcaaagcagtcagagatatgttataattaatatctcacaaaaagttgcagcctgctgttaaattttaggaaggcaaaaactgaacaagataatcgatcaatcctgcaatatttgtggtgtgcagagctcaacctcattgcttagaccaccattacttaatatttaattcagagaagggctaggtataagtttattactttgctacttatggaaagaaaacaaattagtaatgtccaaaaatatgtagggaggctactgtttttacctcctgagtgaatatatattgttgcaaatcctttgggaaaaaattttctcatacaagttgatgagttaattataaattattactttttagtctttatagtgcttctttctttttaagaattggtattagataaaaatatgcactagctacataaattttggaaaggatttaaactgactttaaaatgagtaaattattattgtggagacatattggactctcgggtgcctttttttccttttcttttctttttttttttttttttttggagacagggtctcactttgttgcccagcccggagtgcagtggcacaaacacaactcactgcagcttcaaccttccaggctcaagcgatcctcccacctcatcctgccaagtagctgggacttcacaggtgtgcactaccatgcccacaatttttaaatttttctgtagagatggggtctccctatgttgccagggctggtctcaaactcctgacctgaagcaatttgcctgcctcagcctcctaaagtgctgggattacaggcatgatccaccatgccctgccttcaggtatcttcatagtaagctcttactgtctaaaaggaacataacaaatatgtgtgccaatgaattcaacccagtcacagaaatcctcttttctctttttttttttttttttttttgtcttagagatggggtctcactttattgcccaggctagacttgaacacctgggctcaagtcatactcctgcatcagcctcccgagtagctgggactacagagaaatcctctttccttattacaaaacaagaagcacagccatgacccttgatgcctgacaacagaattataatagggtttgatcagaaagaagtaaacaccagaagaatgcattgaaacgtttgcttgggacttctctaacgcattctcatctgtccagaagtgtccctgcttgtgcgaggctcctacctggtcgagcagccccatgaggagcacgggcaggctggtgtacagcacgttgtagagggtgatgaaccaatcctcgtatgcagtctgtgaggggatgacagaggctccatgtcaccaacaaagacacatgccagcctagttagcacatactcatctgcttcctttatttaacattttgtttgtttgtttgttttaatagagatgggggtcttgctatgttgcctaggctggcctcgaactcctggccttaagcgatctccccatctcagcctcccaaagtgttgggattataggcaaaactctatgcacctggcctgttatcaatattctttttttttttcttctgagacagagtctcactctgtcgcccaggctggagtacagtggcgtgatcttggctcactgtaccttctgcctcccaggttcaagtgattcttctgcctcagcctcccaagtagctgggattacaggcacacgccaccatgtctggctaatttttgtgtattttgttgagacggggtttcaccatgttggccaggttggtctccaactcttgacctcaggtgacccgcccacctcggcctcccaaagtgctgggattataggcgtgagccactgcacccagccctgttatcgctactcttaatgtcaacatgaaaaaataaccaaagataaagataaaaacatacaagcaaatcccctcctttttttttttttttttgagacaaagtcttgcccaggttggagtgcaatagcgcagtctcggctcaccacaacctctgcctcccaggttcaagcgattctcctgcctcagcctcccgagtagctgggattacaggtgcctgccaccacacccggaaaatttttgtatttttagtagagaccaggtttcaccatgtcggccagactgatctcaaactcccgacttcaggcgatccacctgcctcagcctcccaaagtgctgggattacaggcgtgagccaccatgcctggccaaatcccctcctttctaaggtaaaatgtttttacagcaccagaaacatttagagaagtcatgatcattcttaattatgccccaactgtaaggagacacagccccaaaactacaaatatagaagaaataaattgtcttttcagaactagatttttattcatttaagagctctacttagtaaataacaataataacaacattacattacctgcgcagagtagccattgaagaaggagtaccagaaatgaaccaaagtaaaggcaaagtttttgtaaaagaagtatcgtaggaacttgcacatccttatgtaagaccatcggccatgcaccagcagtagcctctgcagatatcggaactgagcaaaggaatagtcactcgacatgacagcttgcattccttcttgtccacttattccaacgccaatgtgggcagctatggggcagagggagaaaacactgtggatcataaaccgattgtgaggcaaaacatcagttgataaaaatggttccatagcaaacaaaaaacaaagacagacattgatggaacaataatacagaagctcttgctcaccatccctcacccccagctcttgaactcaactcaaagtctgagttacaagttgctaaacagagcacacagtagggcctccataaatatctgggaaaggatctcatgtgggtgacgaattccatttggattatctgccaagatcacagccatcccttccatccacagggtgagccccaggcacccatgtgtacactgtgtccttgcctctttggcaacagctgtgtcagtcatgggcagatatgtaatttgtggtagatactacaaatcggctcccccaacttcattccatccttgttctaattagagaggtgggaaaggaaataaaaaccctacatttcccagactcccttgcagctaggctctttgtgaattaggttccactgtttagatccacttatgacttggaagcagaagtgaatcagagcccagcatcgcttcctcttttgggatttctgcagcagagctcatatctactttccagctacctggatgttgacaggcaactataaaggcttcttaatttggaagctctttagaggaacctcttatcacttaccagaagagtagaagctcttctggtaagtgacccagcctagaccctgcttctgtagaccatccagagcttttgaaagtacctagtcccctgtatgaatcttttcttgcttaaataccaactggggtctgtttcctgtgctaaaccctgactgacagaaaacccaagctgagccagtctctctcttgatattctggaattagaagtcagttattttgtgtctagaattttaaggtctaaattcttgaggtaagaaatagttatatttctttctctctcttttttttttttttttgagatgaagtctcactctgtcacccaggctgcagtgcaatggcgcagtcttggctcactgcaacctctgcctcctgggttcaagcgatactcttgcctcagcctctcgagtagctgggattacagatgtgcgccaccacacccagctaatttttgtagagacggggtttcaccatgttgtccaggcaggccttgaactcctgaactcaggtgatccacctgccttggcctcccaaagtgctaggattacacacatgaacaactgtgcctggccgaaatagatatatttcttcctgaagatttctaaggggcagagaaataaagtagtggggagagaggggtggggaggagggagagaatggagggagagaatggggggagagaagagtggggagagaagagtggggagagaagggagggaggggagagagagaaggaggggaagaaggaggaaagggagagagaaggggagagagacagacagacacggggttcctggtgcaaatctatgtccttgttccagtatcttcctgaggcctggcttcttcttggacaacaggaggtgtttaaataaatttacttttttcttttttttcttttaagttacaggatacctgtgcagaacgtgcaggtttgttacatgggtatacgtgtgccatggtggtttgctgcacctattgacccatcctctaggttccctcccctcgtctcccactcctcaaatttaattttttcttaagctagctttggttgttctccaatacttgtaatcaaaagagttttaaccaagaaactattaaactttcaaagtcttattcatggccctctgggaccttaagacattttttttttctttacgggggaaggtttccagaatatataaaattaaagtcacaattttatttatgcttccaatagtcataaataacactttcaaattagagaatgattagttttgtctgggtcttaaaagtaacgaatgtgaagatagacaagatcatttagaaaagatatgttggagaacacaacctatcattgctcagaccctgaaaagtggctgcaatgctgcggcgttccaactaaaaagaagcttcaaaaatcctgccctagttacagaacacaaggtctggcaaattcaaaacataactgtagtgatgtatccaaacctacgttttcagtaacacttctaaaaaaacagaacaaactgcatctcatataatatttatgttctctttgaaaacacacaaatatttcctatgaccagcatggttgccaaacttgctctttcctgccaaaccatggccttttctttcctgaacaagccactgaggaaaatgctgagattctcttggcttatgtggctgaggaagaggaagccctgccccaggccctggtatccagtcctcaaccttcccgctgagcagaccaaggacaaatgtgaaatgaacactgtcatagttcccagggcaaccaaaagcactgaacagatacactataaggtaacattggtcttttttgtaaaatttaagtacaggcatttagagtttcctgaaatctcaaatgcggtgttaggtgcctcactggtagacattcttttatcattccttaacaaaaagaatatttcctcgctacagcaataatccctcttgcctttttttttttgagatggagtctttttctgtcgcccaggctggagtgcagtggtgcgatcttggctcaatgcaacctctgcctcctgggttccagtgactctcctgcctcaggctcccgagtggctgggattacaggtgcccgccacccccatgcccggctaatttttgtacttttagtggagatggggtttcatcatgttggccaggctggtctcgaactcccaacctcaggtgatctgcctgccttggcctcccaaagtgctgggattacaggcatgagccaccatgccccaccttgcctttatctctctcctgcttcacgtacattctcagggtctaagaccaagaagagacaacatccacccagctggtatgagatatcttcaggtaggatagagggagaaggcagcctatgatagtccttggatccttgctaggggcagaaacatggtgggtcatgattccttcacttcttccagactacactgctaaacgtgaatgttagcaaatgctcagattattttttgacacttgaataatttcactcgactactttatgaccaacaatttctttgtgtgtgtgtgtgtgtgtgtgtgtgtgtgtgtgtgtgtgttcttttttgttgttggagaaagggtcttgctctgtcacccagggtggagtgcagtggcacaaacatggctcactgtagtctcaacttctcaggctcaagtaatccttccgtctcagcctcccacgtagctgggactaccggtgtgtgccccatacttggctaaactttctgtatattgttattgatgtggttggaagaaatgacagcttttacaaagtacataaaggcactaatactacttgtataacttctaaggagacccctaaagtttcctatatttttatcccaaagggatgctctataacttatatataaaagtacctggggccaggtgaggtggctcatgcctgtaatcctagcactttgggagactgaggcaggcagactgattgagcccaggagttcaagaccagcctgagcaacatggcaaattcccaactctacaaaaaatacaaaaattagctgggcatggtggctcatgcctgtagtcccagctacttgggaggctgaggtgggaggattgtttgaggccaggaggtggaggttgcagtaagccaaggtcatgccactgcaccccagcctgggccacagagggagaccttgttttttttttaaatgcacctggcatataacagtgcttaataaaaattttaagacaacttaagaaaaacaagcccctctaagattatctacattgactttgtgcaatccctctcattatgtattggtgaactcagaggaacaaaatgtttcaagtctaagtcacataatcagttgataaatctccaaagcaaacccgtcccctcccattatctagaaggctactttataactgaataaaaatcatgtttgacttgtccttttggcacggctagttacgttaaaggtacgtaatggaaaataaactagagctggctggctatggaggaaagagatagatctaactccgagcaagcaataccattcgcatggtagggcaagcacatgcaaaaaaaaaaaaaaaaacagtgtggatgaattaaactgctagtgaccacagacatacgcactgataaagaaggcaagatgacatacgtcatacagctgactcctgttgaggaagataaagttggaatattcttagtatacatcaaggaggaggaggagactaagaaaagaaagagacagactcatgagtcacaaaatagactgaaaagtctagttatatataatgcatttaagcaacccagcatcacaggaacatgcaattacctatgtacagtcaggtaatacttcagctcagtgataataatacgacagagctggaggtgacattagggattattttcttttccgatgagaaaactgaaacctgagcataagcccaaggtgacaccggattttggcaataggatgaggatgaatatccaggtcattagtttgagtatttttaatacaagatactcccttatagtgacagagggaggaaaaaggaacagaattcagacatagagatgagggctgtgggtgtgcttctgcaggctttaataccagcacaactgtatttctgcatggcaggactcaatattttaattgtgtggacttaaattctagcatccagaaaaaggcagccttctagggaggtgaggaggatgatgagagcacgtggaagcttttcttcagtgctaaacatgttactctaaactcacaccaggtgacccaatgatgaagttcccacagatttaccaaaggtaggaagaaagtcccagaaagaaatgcttagatgaaggagaatgatattgtcaaagcaagcaccagccagagttcaataatttatgtcttacaaaacttattaaatatcagggttttttgttttgttttgtttttttgagatggagtctcactctgtcgtccaggctggagtgcagtggcacgatctcagctcactgtaacctccgcctcctgggttcaagtgattttcctgcctcagcctcccgagtagctgggattacaggtgtgcaccaccacacctggctaatttttgtatttttaatagagacggggtttcagcatcttgatcaggctggtctcgaactcctgaccttgtgatccacctgcctcggcttcccaaaatgctgggattataggcgtgagccactgtgcccagccaatatcagggcttttaataaacccaaaatatgggaagagaaccagtaagagagaaaaaaatacacaacatctatataaaagaataaaaatataaggataaatttccccccatagaccttattttcctcttcgcatccttcagaagccctgtcagtgatactctttcctcctgatgggctgtgggctttctgggggtagggtcacaggcgttgtcatggttaagtgactttatgaaacatctgctctatgaaaacctaagctgtaaaatctaaaaaaagaaaatccaccccctacacattccagccatttctcctctctagcacgttgggcctcactggccgtgggtgcatgactcacttttgatcatgttcacgtcattggccccatctccgatggccagcgtgatggctttcttgtacctcttcaccaggtccaccaccatggccttctgcttgggggtgacgcggcagcagatgactgcgctgcactcgcaggccaggtccacaaagtttttctgccgctgctctttcttagcttctagcctccttttactttgggtccgcatccgtctttcttcttctgttcttgggaacttcagcttcagaatcttatttctcttggtctttttctcgagaagaatttcattctgtgaaatcagagagggaaaaggttacattcactttagttttaccccaggagtaccattcccaagatttaaattatgtgaaggataatttttggattatgtcactgattatatttgacaaataaatttgattttataaccaaaacatgtatatatatgtgtgcgtgtgtatgtatatacacacgcacacatatatgtatgtgtgtatgtatatacacacacacacacacacacatatatatatatatatattttttttttttttttttttgagatggagtctcactctgttgccaggctggaatgcagtggcacgatctcggctcactgtaacctctgccttccaggttcaagcaatttccctgcctcagcctcccgagtagccgggactacaggtgtgcaccaccacgcctggctaattattttttttgtattttagtagagacggggtttcaccatattggccaggatggtctccatctcctgaccttgtgatctgcccgccttggcctcccaaagtgctgggagcacaggcgtgagccactgtgctcagctatatatatatttttcaatggagatggggtcttgctgtatagcctgggttgaagtgcagtggctattcattcacaagtgtgatcattgcatgctgcagcctcgaacacctaagctcaaaccaccctcctgcttcaacctccagaggagctgggactacaggcgcatgccaccacatccagcttataaaatatatatgcaacaaaaatttagaaaatctaacaatctataaagaagaaaatgaaaaaacccattaattagtaaaccaagataaccacttttacctctttggtatacatcctttcatatatcatatattattaagtctcaaacttggaaaaaccacactttcatgtataggctaagagacttttaggttggcagttaacatgtgaaagcatctaaaagtggctccaaatgaacttctttcttttgagttaaaggcacagatacactaatgatacgtaccaaccaagaaccagtgatgattaaggcacggtttccaccgggtggaaaaaaagattcctgcacaggaggtgcaaactttgcgtagacgccacctctattcctctggttttccatccttgcatgaagaagagaactaggggaaaccaaatttcagtgtttaaagtgtaagaccctaaataggcccttgactctgagataactttgacttaaaaaaaattgtgacaaaaaaacaaagtttaccatcttacctatttttgtttctttattttattttcattataatttttttgagagagggtctcactctgtcacccaggctggagagcagtggcatgatcatggatcactgcagccttgacctcccagcctcaagtgattctcctgcctcagcctcctgagttgctgggactataggcacacgctatcacgcctggctaatttttgtattttttgtagcaatagggttttgccatatcccgggctttgaccatttttaagtgtacaacttagtagtgttaactatagtcacattgttatccaaccaatctctagaactttttcatcttgcaaaacggaaactctatacctattaaacaataacacctcacctcactcgccctccagtccctggtaacttccagttaactttctgtttgaatgaatttgagcactctagatacctcatatatgtgaaatcaaacagtatttgtctttctgtgactggtttatttcacttagcttaatgtcttcaaggttcatctatataatatatgtcataatttccttcctttttaaagttgaatatattccattatgtggaagcaccacattctgtttatccattcactcactgatgggcacctgggttgcgtccatctcttggctgctgtgaacagtgttgctgtgaacatgggtgtgcatgtatctctttgagatcctgctttcaattattttgtggatatacccagaagtgggattgttgcatcatatggtaatcctttttgaaattttttgaaacatcaccatactgttttgcatagtggctgcaccattttatatatttcatcaacaacacacaaaggttccttcaacaatgattgttattttctattgtgttttgtttttgatagtagccatcctaaagggtgtgaggtgttatcttgctttggttttgatttatcttcccctaatgattagtgatgatgagcctcctttcacatgtttatcagccatttgcatgtcctctttggaaaaatgtctactcaaagtgctttgcccattttttttttttttttttttttttgaggcagagtctcgctctgtcaccaggctggagtgcagtggtgttatctcagctcactgcaacatccacctcctaggttcaagctattcttccacctcagcctcccaagtagctgggactacagacgggcaccaccatgcccagctaatttttgtatttttagtagagacagggtttcaccatgttggccaggatggtctcaatctcttgacttcatgatccacccgcctcagccccccacagtgctgggattacaggcatgagccaccacgcctggccagcccttttttttttttttttttaactgagcgacatgtaattttactatgtctcgattcatccaccatgggggtaccatgtaattcatcatttttcaaagacagtcaaaggaagatacagttgaaaatgtatacacagcaacagaagaaaggcaatcttaggccaggcactgtggctcacacctgtaatcccagcactttgggaggctgagacgggcagatcagtcgaggtcaggagttcgcagccagactggccaacatagtgaaactctgtctctactaaaaatacaaaaattacccaggcgtggtggcggtgcctgtaatcccagttacttgggaggctgaggcatgaggatcacttgaacccaggaggcggaggttgcaatgagccaagattgcaccactgcactccagcctgggtgacagagtctttctaagaaaaaaaaaaaaaaaaaaaaggaaaggcaatcttgatctgaattagaatactggctattgtttgttaggaataaacttattttcatataaacaaaactatatctgtgtttgagaaattctcagtgctttatatcaacaaattaaatgtttgtgttaaaatgatatatgtgacaaggctacgtgtaacactttcatgtgatagaaaaatgagtcatgaaattttggagtggaagggaccttaaatatcttgtccaatctcttcatgttacaaataaggaaatcaagccagaggaaggtgatgtgatttgcctgctgcaggttgataggaaaactagaatgaggactcagttatcttgtaacttctggctcaggactcttactattacatacaaaaagccattgttcttctccttccaaagaaggcttctcagcctttgcactcttgatgtcttgggcctaataatcctttattttgtgtggccatcccttgcactggaggatgtttagcaacatccctggcctctacccactagaagccaggagcacttctctgcagctgaaacaagcaagtgtctctggacagtgccaaagggtccctggaaggcaaactcactccccacggagaatcactgcactagaggattaagtatctagtatcccttttccacatcaatttaattctcattttcaagttaaaagtgagtgactaagacaaatcattgaaaggccgtaagagaaaaaaaatgaagataccttctattcaaatcattttataggaatcatcaatttaagagccacctgggaagatgattcctctctctataaaggtaaactcagctaagggcatggtcacaacatttgctacttgcatacattttatcttttactttagcttcgggaccaatttttaagactttcaaaagagagaccagaaatttttttacagccccatctacaaaaaataaacaaagccatatagtaattaatcagattacttgaagcccaaaactactaaagtaaactcattaagcattaagcatttatttgtctgttgctactttttttttttgagacggagtcttgctctgtcacccaggcaggagtgtagtggcactatcttggctcactgcaacctctgcctcccaggttcaagcaattctcctgcctcagtctcccgagtagctgggattccaggcacatgccaccatgcctggctaatttttgtatttttagtagagacggggtttcatcatatcagtcaggctgttctcaaaatcctgacctcgtgatccacccgcctcggcctcccaatgtgctggtattacaagcatgagccaccgtgcccagcctgttgctacttttttaaaacctaaaagcacaaaggggcatggcttatgtacctctatttgggcacataaactaaatcagttctaaatggaactgatttagatcataaggctactgattttgtctaatttgacggaatacctaatatactagaacaactagaaaatgctttatcaccatcattagaaataagactaatattgaccatcaattccctcatcactttatcacacctggcaaatgtgtatgttaacagtttaatctgacctcatgctggcctgagagaagctctgtagggaaaaatcttgaggaactgtcaggccatcagtaaacacatcacagtaactgtgtgcagcatatttatagcttcagaacaagacagggctttttcatcatacatttccaggtctgctgcgactctgattcaaagctaacaaacgtttcagcatatgctaacatttgaattatcaggcctgccccacctagactagattacaggggacctacatgatgtaacccacccacacatttccttcccgcaaaagttttgggttttttttttcctttcttctatttccctttcaaaagtaaaagttcctagaaaaagcaaaataggactataattcatattaatttgctagcgatattacaggctttttacggaatttttagtaggtgaaccgagttttttttttttttttaatgagacagagtttcactcttgtcacctaggctggagtacagtggcgtgatcttggctcactgcaacctctgcctcctgggttcaagtgattctcctgcctcagcctcccgagtagctgagataacaggcaccgggcaccacacccagctaatttttgtagttttagtagagacggggtttcaccatgttggccaggctgctctagaactcctgacttcaggtgatccacccgcctcggcctcccaaagggctgggattacaggcatgagccactgcgcctggcctgagctgagaaggaatggagaaaaatggcctctgaagggccccaagtttccctaaaagtaaaatctgctcaaatttaggctgcaccttgattacttggaactgcctgttgttgtcttgcctcatttaaacatgaggaaactgccccaagtgacacatcgtaacccctatttcttcatatctgctatcttctacagacagtcttgcatttgcaaagatgagctattacgtaatttcatactgcaggcttttactcacttaatatcctccccatagcagatggtggtgtcttcagtcagaagttcacaagcaaatcctatattttcagcagtttctacaatagaataaaattaagtcaaatgtcattcctgctgtttttattttattttattttgttttttgagacagcatctcactcccactgcctaggctggagtgcagtggcacaatctctgctcactacagcctcaacctccaggattcaagtgatctgcccatctcagcaccacccgcagcccccaagtagctgggactacgcaactcgctgccaagccaccaaacaatttgtgttttttctagagatggggttttgtcatgtttgccaggctcattcttactgttgaactgaataattgattttacctagtaatgatattttttagttcatgaacataaccagattcacacaaacacactatttttctatagcaatctgtaggaatcacatgcagaagaaaaatccttttctccataataaaacaagtgaaagtcaaagtctaatttgaaatgttttcaataataaaatgtgctatattatcaaacatataaactggttatttagtaaaccaatgttcattaaattactaaacactctcagttcctggttcaattactctgttattggcggggggcgggggcagagggaagcataataatttccaccaacccttacgtgaagattttttttccttttaaattaccacccaatttggcatttatttaaggtcagggctgtgcttcccataactttgcagagtgtgtaacccgttgacgatttcagcgcaagagacattatttgatttcttgtggaaggcttacaaagtaaagtatcaataccaaacaagtgcttgttgagttctaaagttaaaaaattaaaatcgttctttccttaggtatacaattttattgccaagcaataaaattggcaagaaaaccaaagttattgttcagtactttgtattgttctactctgtgcccaccaaatgtcaaagcactggaaggacagagggacaagagggatggccctttcaggacgggaacccacgtctggctggagagataagaccaattataatcagcaagacatggccaggagctaaattataaggaagaaactgctactgagggggatcaggaaaggatgcagaagaatgtgctggaaaaacagaggagggtttctcagaaaaagcatcttccgtccaaagaaacagtgtttgtacaggatgaaaagtctgaggaggtcatcttgggcaaaggaaacggcagctataaatatttgtgaattaacagatatgcttccctgcacaatgaattaccctttttgtctccagtaagcacccagatcttaatgtcagcttttgcaagttttgaaatggtttctggaactccatcctgtagcttgtcttcaatagctgtagctcccaggagctagaatgtatattaaaaaaaaaaaaaaaaggaattagcaaacaaaccaaaagttttctgtaattacaggttgccaacctgtaaaaagaagggctaattatacatcctggttgctgctctcctggggccaatggccagtgttaacagggaaggctgccatgtttcacaattactgcaaaccaacacacctaaaaactttttccctaaaggatgaactatttaatttaccaagacaaaaatgcaagtacaaaatcaaggatgttaaaaatacacttttcttgtgtatttgtggctttatactgacataaaccgtaaaccagttgcaatactagctatttgttgaatattttccacttatctaaaccctacaaaaactatgtattaaatttggaaaacttttagaaacaatatatttttcttatttcaagattttgcagaatatgaattgtttcggtaattcccccaatgtaataagtattagatgcaggtttgttattgtttaaaaattataataaattttaataagtgatatacaaattatggaattaaattagaacttctcctaatgtattttgtcttttggtttctcataatggcaacttctgttctgctcctattttggtgaataaaagaaataaccttcttccattgtgccagtgtcaaatgctgaagttacaattatctcttaagcatgagatcaaatattcaataaaacttaataaaaatttcaattctgcttagaatatcaaagaaaaagttattaaggctaaaactcacaattaagtctttttcaatctcctcatatactttatccagagcttcgtcccggttggtggaggccacactggcagccataaactttttattccattctgtaaattctttttcttcaatttccttgtagcaaaggcatagggttctaagagtttcatttgcaaagatctgttttatttaaaaaaataaatccaccaatgcaaagaatagttaatttatgtaattcaggatcaagtctgaaattttactttgaagtaatatactaacagaatttaaaaagagatcattaaacatgacagattctgtacaaatacactttagagaggggattaaatgtcactttttttttttttgagacaaggtctggctttatcatccaggctgggatgcagtgatgcaatcccggctcactgcaacctctgccttccaggctgaagccatcctctcacctcagcctcccaagtagctgggactacaggtgtgcaccaccacgcctggtaatttttgtacttttttttgtagagatggggtttcatcatgctggtcttgaactcacgagctcatgtgatctgcccaactcagcctcccagcgtgctgggattacaggcatgagccactgcacccagcctaaacatcactttataatagactttgcttttctaaacttctatagggtccaggactgcacttccagtttccaaagggaaaagcttacctttcttctaaatcttctattacctttctcattttctcattttctctttttctcttcatgactaggaaaatatcagaccaagggagctgccttggggtgtaatgacataagcacgaacctgacaactttataacttgttccaacaaactgtgatacaagtccaatcacctatgaactctccactaagcattattccctcaaaccaattctaaaatacacaagccattgttaaagctgaggtcaaagcttttaatggaaaagagtatctggcaattttcccatgatgaacgattcaaacattttctttttttttctttttctttttcttttttttttttttgagatgaagtctcactctatcgcccaggcttgagtgcagtggtgcgatctcggttcactgcaacctctgcctccctggttcacgccattctcctgcctcagcctcctgagtagctgggattacaggcgggtgccactgcatctggctaatctttgtatttttggtagagacggggtttcaccatgttggccaggatggtctcgatctgttaacctcgtgatctgccacctcaccctcccaaagtactgggattacaggcgtgagctactgcacccagcctgatttaaacattttaaacagtttcaacatgaaccagtaaacatctcattactttatagtcacatcttttttattttgaccaagttttgctcttgtcgcccaggctggagtgcaatggtacgatctcggctcactctaccccctccctctggggttcaagcgattctcctgcctcagcttcccaagtagctgggattacaggtgcccaccaccacacccagttaatttttttgtatttttagtggagacggggtttcaccacgttggccaggctggtcttgaactcctgacctcaggtgatacacccgccttggcctcccaaagtgctgggactacaggcatgagacaccaaatactcaatcagttgaaccgcttctgccatcttggctagacaagatgtgacctatagtcagctctgtcatcctgtcacatatgaatgctttccttcctttgcactacaacttgaagttagtggaggtcttggggaccacacacatagtaagactacaacctagtatggttatgtagcttgctcaaggccactggaagagagctaagccattcccctgcctcagtcctatagaccttgaagacccacatgctgggagagggcaccatggtgatatcccaggaagtcagtggcaggggcagaactgggacccaggtggctgtattcctactttactgctctttccaccccaactattgcaaagcaaagggagggtcagcagttaacatacagctttcatgcaaacttaacagacagcatcagagagtaagttcagaatcccttgcagaaagaataaaagtgaaacttacatccagggcatcctgtgtttcttgcttagtaggattcattcgatgtaaccgttcataaataacagtgtcagcacctttacagtaaagcttgatattgccttctggggttcttactggtagtaaaagaaggaaataaacacaacaaagtttgattttttatatatatattttttgagacagggtcttgctctgttgtccaggctggagtgcagcagttcagtatcggctcactgtagcctcgaccccccaggctcaagcaatcctcccatctcagcctcccgagtagctgggactacaggtgcatgccaccatgcctggctaatttttatttttatagacattggaggtctcactatgttacccaggctggtcttgaactcctgggctcaagcaatcctcctgcctcagcctcccaaaatgctgggattacagatgtgagttaccacacccagctaagtttgattttttaatagaaaactacatttataaagttaatttgaaatgttactatctcataattcactgttagcttaaaaccatcagttcctctagaaaagtgttgccttcaacaaaactggtaagtcattatctacattgaatgtaatagtgaaataaatataaaaagattccttcacagtcagctctgttttttataacctcagttattcttccaacaaatatttactgactccctaccatgtgctatgccatgttctagttactttcttttgtagactttttctccatccaaccaacaggtagtttctcacctatgaactcacaacacttactgcttttaatacttcgaccacaacaccactcctaatgaccattttttttgggttttttgattaatgcaataattgtaatacatccctcactgttaaccagattttaaatcaaggtagatggcaagcatgataatcagtctagatctgtgtaagggacacagaaagcgttcagtaagtgtgcctaaggagggtgtaatagttaaacctgtatatttttattggttaaaaattcaatcatagtggagaaggcttgtagataccaccttaaccaagtgatcaaagttaacatccccattaatgagacaaaccaataatatataccttctggctaggcagggtggctcacgcctgtaatcccagcactctgggaggccaaggcgggccagtcacctgaggtcggcagttggagaccagcctgaccaacatggagaaaccttgtttctactaaaaatacaaaattaaccaggcatggtggcacatgcctgtaatcccagctactcagaaggctgaggcaggagaatcacttgaaccagggaggtagaggttgcagtgagccgagatagcaccattgcacttcagcctgggcagcaagagtgaaactctgtctcaaaaaaaaaaaaaaaaaaagtatatatatatatatatatatatatatatatatatatatatatataacatgtatatacacatatatacatacatatatctacatatatacacacatatataaatacatgtatatataaatatacatatataaatatatgtatatatatataaatataaatgtgtgtgtgtgtatacaccttctgatgtgatacttaaagaaaagcacagcatcacttacggactcttcctgccaacaatgtgtaacctagctctaatcatgagggaacatcagacaaacgcaaatggagggatagcctataaaataaccagcctgtgctttttaaaaatatcaatggatgaaagatcaaaaagagattgaaccgtccttgactcagagtcatgatcacctaatataacctgtgatcttagattggatcctggaccagaaaaacaaagaatgaacctccctggtaaaatctgataaagtctattgattagataatattgtactgtgttaaattttctggttctgaacattgcactgtatatataagtgagtgcttctgttcttaggaaatacctactatggtatatagtacagtatttaggggaaagggacattaggcctgcaatttattctcttttttatatttttattttctttttttatcatgtaatcttgctccttctaacgcaatttactctcaaatggttcagaaaacaataacctgtatgtatgtgtgtgtacatatatatgtgtgtatatatataggtatatataatgaaattacatatatataattagatatatattagatctatatatagagatatgtaaatgaaatttcattatgttaacaattggtggatatggaagagtatgagggctctttaaaccattcttgtaacttttctataagtttgagattatttcaaattacgaatttaaagcagttcagtggtaggaagtgattttcatcttcacttggtggtctgttatgtgcctgcattgcagatatgattttgattcataagcatagctttgcttttctcagaaatcttttcctgctgagtcctcccttccctgccatcaagtacagaagagagcactcagaggtgctcaaaaaataaaagagcatgtgttgtttaaaataaaagactgctacaaatgtctacctgctgcttcagaaatgttccacctgctgccccagattcagcatctggcagcccacgtggttaaagaatgtcagcagctgtaatcccagctactcaggaggctgaggcaggagactcgcttgaacctgggaggcggaggttgcagtgacctgagatcgcaccactgcactcctgggtgacggagcaagactccatctcaaaaaaaaaaaaaaaaagaaaagaaaagaaaaaaaagagagggattaaaaaagaacgtcagcagcatttgcaagattcagagatactgtggctacccctttgagtagggaacacagtgaagaatgaagaaaacaataccagtttcttttttttttttttttgagacggagtcttgctttatcgcccaggctggaatgcagtggcgcgatgtcggctcactgcaagctctgcctcccgggttcacgccattctcctgtctcagcctcccgagtggctgggactacaggtgccagccaccacgcccggctaattttttttgtatttttagtagagacggggtttcaccgtgttagccaggatggtctcgatctcctgacctcgtgatccacccgcctcggcctcccaaagtgctgggattacaggcgtgagccaccacgcccagccaacaataccagtttcagtaaagctgcagaaatctcccaggagccaagtagctctttcactggctgctttatcctgatgccactcaatacaatgggcacaagcaacatctaaatgagcgattcatagacagactctgagggggacttaccaatgatagacattcgcttccggtcactgttgaagtccaaaatggcaagaacattgtaagtcctttcagtgcccagttcactgatggtgatggtgttctgggtcctggcgaggaaggcaaagccaaagttcctggcagcgtttaccagggcaccttcatcgggagaggctgcctggtagttgagctgacctaacaaggaagcgagagaaatcccagaaaagctgtaaaaacaaatgcagagctcattgttgaggcctctgctgaggctcctgtgggggtcagatgggctgcaaagcccaaaacatccccaggaaaacgagtcattgacttggaagggttatgccaagattaaaacttctttgttttatcttgacttataaacagtaatataaactaaaaaagaaacattggtggagaatgagggaaaattcccataatcccaccatccacaggagaaacaacaggtgttgacattttatcattccctccagtgccttttaaaatgtctgtatctgaaattgtttctatcaagctgaatatacatttacatcctgattattttaatgctgtatctgagcatattgccatccctttttaaattctttataaacatttgaacaaatgtaaatatgttatcattttcccattacagacacttaatttccaaatttttttactctcaaaaagtcacactttaataacccttttgtatgtgtgtaaagatttttctgtttcttttttctttttagagacagaggtctccctatgttgtccaggctgctcttgatctccggggcccaagtgatccttctgcctcagcctaatgagtcgctagggctacaggctcatgtcacctcacctggcttattctctttctttcttgtttttctgaaacagggtctcaccgtgttgcccaggttgcagtgcagtggcacgatcatggctcactgaagcctcaatctccccaggctcagtgatcctcctacctcatcttcccatgtagctgggattactggtacacgccaccacacctggctaattttttgtattttttgtagagacggggtttcaccatgttgctcaggctggtctcaaactcctggactcaagtgattcgcctgcctcagtccctaaagtgttcggattacaggcatgagccactgcccctgggcccctggcttattttctaagagcagattcctattaggaaaatactgagccagagaacactgataattttaaaactcattggtatacaatactaatttgttttccaagaaggttgtaccagtttatcttccctctaaaaaagtatgttttctttctttctttcttttttgtttttttgagacagtcttactctggcaccaaggctggagtgcagtggcaccatctcagctcactgcagccttgatcgcttcaggcgcaagtgatcctcccacctcagcttcctgagtagttgggactataggcgcacatcaccacgcccagctaatgtttgtattttttgtagagacaggatctcaccatgttgcccaggctattttttctttaccatagctatattctccttattaaaaaaaaaaagaaaaaaaaaccacacaggctgggtgcagtggctcacgcctgtaatcccagcaatttgggaggctgaggcaggtagatcatgaggtcaggagatggagaccatcctggctaacacagtgaaactctgtctctactaaaaacacagaaaattagccaggcatggtggcacgtgcctatagttccagctactcgggaggctgaggcaggagaatcacttgaacccagaaggtggaggttgcagtgagccgagatctcgccactgcactccaccctggtgacagaccgagactccatttcaaaaaaaaaaaaaaaaaaaaagaaagaaagaaaagttgaaacaaaccaaccaaccttagtttgatcactatccgatatcttaatgtttaaaagttaaataatggaaaattgtcttctattcacaactacatttcaacaataagaataagctaggttcagtggcacgtgcctataattgcaactattcaggaggctgaggcaggaggatcacttgagcccaggagtgtgaggttacagtgagctttgatattccactgcactccagcctggctgacagagcaagatgcagtctcttttaggaaaaaagaaaaaaccaataagaagaggaataaatctcacagccagatacacaaaagagtacatatgctacatgattccactgaaataagccaaaaaactgacagagctaacctgtgttattcgtagtcaggaaagtacttttcttgtaatcactggaaaggaatgtaaagggaattctagggggattgataatgttcttttttaaaaatctgggtgctcattacaagagtattggtttgtgaaaattcattgagttatatacttatgatacgtacatatctctgtatacacatgttgtacttcaataaaaagtttaaaaaatactctgcctacccaagatcttctatttttctactctagttattttgtctcaaaatagaaggaaaagcatttccgtggccagatgactttggacagaaagagcatttagttttccaaaatactttgaccaggatgaaggccacagatgcatgagcagcctcacttggaatggttggtgctctggggtaacggtggcagagagagctaaacacaccttccttccttccttcacaattggctcagaggattcactttttaagtcaatattaatcacttcctaattaataattaaagatgacacttagggtctctctgtatttgttcactcagaaagtcattcactagaagctataaacgcacttcctaaatccggccatctagcaatcatatacaaatgctagagggcaaactatttaaccagagacaaatcagcagcggtgagaacaaagcctttcccttcggcaacttaagttggcacagcgatatatggcataatattgacagcaaacgcatttccagcagagaaaaggaacaaaataataaaaagtggtaaagttcccacaagtaagacactcatatctagagcaaacaccttgatatttttatcattaaagaaaaaaaaatgttttccattaccttctgataatggaatcacagaattgcagactaacagagatgggaagaacgtcagtgacttggtccaaattccaaccttatgactgctggaagacacttggactaaaaaactatgcagccataaaaaggaacaaaatcatgtcctttgtcacaatagagattaggccattatcctaagcaaattaactcaggaacagaagaccacatacctaccacatgttctcacttaacattgggtactcatggacataaagactgcaaaaatagatagtggggacttcaagagaaaggagggagggagggcaacaagtgttgaaaaacttactattagggcagggcacggtggctcacacctgtaatcccagcactttgggaggctgaggcgggtggatcacaaggtcaggagtttgagaccggcctggccaacatagtgaaaccccgtctctactaaaaatgtaaaaaattagccacgtgtggtggtatgcacctgtaatcccagctacttgggaggctgaggcaggagaatcgcataaacccgggaggcagaggttgcagtgaaccgagatcacaccattgcactccagcccaggcgatagttcgagattctatctcaaaaaaaaaaaaagaagagaaaagaaaagagtgtggtgttgatggtatagtggtgagcatagctgccttccaagcaattgacccgacttcgattcccagccaatgcagcaggctgaccttttgtcctggctaacatggtgaaaccctgtctctactaaaaatacaaaaaaaattagccaggcatggtggcgggtgcctgtagtcccagctacttgggaggctgaggcaggagaatcgcataaacccgggaggcagaggttgcagtgaaccgagatcacaccattgcactccagcccaggcgatagttcgagattctatctcaaaaaaaaaaaaaaagaagagaaaagaaaagagtgtggtgttgatggtatagtggtgagcatagctgccttccaagcaattgacccgacttcaattcccagccaacgcagcaggctgacctttcgtcctggctaacatggtgaaaccctgtctctactaaaaatacaaaaaaaattagccaggcatggtggcgggtgcctgtagtcccagctacttgggaggctgaggcaggagaatgcatgaacccgggaggcagagcttgcagtgagccgagatcgcgccactgctctccagcctgggcaacagagcaagactctgtctcaaaaaaaaaaaagaataaaaaagaaaagaaaaactaactattaagttctgtgttcactacctggatgatgggatcaattgtaccccaaacttcaggatcatgcaatatacccatgtaacaaacatgcacatgtatcccctgaacctaaaataaaaattgaaggtgtaaaaacaaactaaaaaaacaaacaaaaacaaagcaaccttcctaagaaaactctttatttatggcacatttagaggcaaccagaaagaccttctttttctttcacacactaatttgtggctcatgaaattgatgtaatcaaagaaagatgctcaaaccacaaatcccacctctcagttctcatcaacctgattccctagcttcagggtaatggtggcagagaaagctaaatgcacctttcttctctccttcacaactgcctcagctgattcactctaatttctttttgagatggagtctcactttgtcgcccaggctggagcgcagtggcaaaatctcggctcacagcaacctccgcctcgcgggttcaagcaattctcctgtctcagcctcccaagtagctgggactacaggtgcccgccaccacgcccagctaatttttgtatgtttagtagaggtggggtttcacaatattggtcaggctggtcttgaactcctgacctcaggtgatccgcctacctcagactcccaaagtgctgggattacaggcgtgaatcactgcacccggctcactctaattaagtgacaataaactacctggccaggcatggtggctcacacctgtaatcccagtgctttgggaggctgaggcgggtggatcacctgaggttaggagttcaagacaagcctggccaacatggcaaaactccatctctactaaaaatacaaaaagttagccagggtttggtgtgggcgcctgtaatcccagctactcgggaggctgaggcaggagaatcacctgaacctgggaggcagaggttgcagtgagccaagattgcggcactgtactccaacctgggcaacaggagcgagactcagtctcaaaaaaaaaaaaaaaaaaaaaaaaagactgggtgtggtggctcacacctgtaatcccagcacctttgggaggtcaaggctggaggattacttgaggtcgggagtttaagaccagcctgaccaacatggagaaaccccatctctattaaaaatgcaaaattagctgggtgtggtggggcatgcctgtaatcccagctactcggaggctgaggcaggagaattgattaaacccgggagacggaggttgcagtgagccgagatcatgccattgcactccagcctgggcaataagagtgaaacttggtctcaaaaacaaaacaaaacaaaacaaaacaaaacaaaaaaaaaaccacacacgctcacaaaaacaagccctagctctcagatgtctttttctcctcaatcctctcaccccctttaaatgatttgccaagtgtctcccacatccatggctttgttatccttcccaaagaccccatactaatgcaaaccttcagcctctgtgccaatctccagtgcctacctgctccagactctcacacccgtgatgcgcaaaactcctgaaacaagctctctgatcattaactcagaacctccaggtgaagtgaaggcttccaagccttccacattctgctctcacatgacctctgtgcaggcgggagtctgcaatggcctcaaggttcccatcccagtgctgtacattcactttctcccatttactcaatcaagcactaatctaggtactgctgtgaagggaatttgcagatgtgcgatcctaatcagctgaccttaaaatagattatccaggtgttcctgactgaattagatgagcttaggacagaactcttcttggggagagacttggagcagcatgaaaaaggttcaatttaagggagattctccaccgctggctttgaaggtgaagtggaccagctggcagggaatgaggacagtctctaggagtggagggcaacccagttgataaagaataaagaaatggggacttcagttctacaaccacagagaactgaatcctgctgcaaccacacgtgaacgtggaaaaagacactgagctccagatgagaacatggcccaaacttgattttagtcagatgctgagcggtgaacccagtcatgccatgctcagaattctgccctacagaaccgtaagctaatgaacaggtgttttcagtagctgagttacactaattcactacagagtagcagaaaacaaatgcatgtggcagggtgtggtggctcacgcgtgtaatcccagcactttgggaggttgaggtgggcagatcacctgaaatcaggagttggagaccagcctggccaacatggtgaagccccatctctactaaaaatacaaaaattagctgggcgtggtggtgggcccctgtagtcccagctactcaggaggctgaggcacgagaattgcttgaacctgggaggtggaggttgcagtgagccgagatcatgccattgcactccagcctgggtgacaagagcaagactgtctcaaaaacacaaaacaaaacttgaaggtgtagtccccaaggtccctttcaagggatcctttcctggtactttatggttaaaagccgaaagcaatttctttctctaagctcctgcactagaagccaacatgtctctattcgtacaacccttgacctcagctgacagtggacaaagagctgcggtatgtcaggctggagggactttgtgttatttttttttttttttgagatggagtcttgcactgttgcccaggctgtagtgcagtggcgtgatcttggctcactgcaacctctgcctgccaggttcaagcgattctcctgtctcagcctcccaagtagctgggattataggcacatgccaccatgcttggctaatgttttgtatttttagtagagatggggtttcaccatgttggccaggctggttttgaactcctgacctcatgatctgcccgcctcggcctcccaaagtgctgggattacaggtgtaagccaccgcgcccagccctgctggaaggaactttgtacatccaaccttcttactacaacaccgaggaaggtggttctcagagagggacccagactgggctgactcatctctagcatgtagtccagggctcttcccataatatcccactggggaaagatagaatagggaccacaggatgaatttacatttgcctaagttggccagttagcccttaaaatcctatcacgtacccagagaagagtacaataattgtgcttatgagtcaaaaccaaagagaaccaggtgactttgtaatatcatactttatgcttattgcctgggtaaaattggcttggtgagtcaaatagacttagacctctgcttccatgattcaggacctggtatcgcccctttctatccttccccacatcatctgctgataaacccttccatgtatccaccctaatctgaactctgttaccttgcttcattgcaatattagattcatccttggaaaatgggtttctttgaaacttgctgaaaggtatcatgtacagcttctatacatttaggtgttttttgtttttttttgagatagggtctcactccatcaccgaagctggagggtaatggtgagactatggctcactgcagccttgacctcctgggctcaagcgatccccacctgagtagctgggactacaggcatgtcccatcacacctggctaattttttgtattttttggtgagatggagttttgccatgttgctcaggctggtcttgaactcttgagctcaagcaatccattcacctcgaccttccaaatgctgggattacaggtgtgagccaccaagcgttggcctacacatttagtttttatgcatattccttctctggaaatttcatacctgctacatatgaaacattaaggttgagaaaagagagggacttatgtatgccgcactgactgaagtaaaaagtggaagatgtagtgaagtggatgaagtgagggaatgaagtgaaggcagactacgctttattacagaaacaccaaaagaactccttttgctctttctataaagtgcatgtgtgtctatataatttatcattatgtccatttgtgataaaatgactagctttccttgatacaggacaaacttgctgtgacaaagctggcacaaactgcatcgaaggattctgcaaaggaacctacaagccattctggcttgttcccatgaaattcacattaattatgctcctttaaatggaaaaaggcaccttaaagagatccaggctgaggctcatattatttcaaacccaaactataacagaatctagtaaataagagcatatatctgaaattatttggtagaaaagattagtcaagttcaaagtccatttctgatacagataaagcttgacttttcactctcagtcaatgctcagtaataaatgtgctaagaaaagttagtttcttctatcatagttcaagtaccaatcatttctttcaacaagatttcatttgcaaagtgaaaaaaatacacctggagctatagctatgaataagtgtaaattttcagggacaagaagcttgtttcctactttgctcttccataaaccatctagtggtaagtgctgagaaatattcactgcattctaatatgagacagatttgtgtactacttgacatgcatttgagccataagcaggagttacctggaaacaaaaaacctggtctctaatgcctgagatgccagagaaacactcaccatcagtcctatccaccatgactgtgtggcaaactgcgagcaagaagaagaactgtcgtacttctggctctttccctgactggatttgctcaataagatagtggtcataaaatgcaagcttcccatcagcatatgtattccagctaaaatcaacttgctgaaagaaatggagaaaaacaaaatatgattttataaaatatttttgacttaacaaatgacatgaacttttcttcaaaggcaaggtttcaattatgcaaaaaccaccttaggattttagcacattcttaaatgtcaagaggctcacaactgtcttaaataaaaagctccccccctttttttttttggaaacatatatgaccatatatgggtctcactctgtcacccgggctggagtgcagtggcttgatctcagttctctgcaacctccacctcctgggctcaagcaatccttctgagtagatgggcctacgggcatgcaccaccatacctggctaatttttgtatttttttgtagagatggggtttctctggtctcaaactccttgactcaattgatctgccaaacttagcctcccaaagtgctgggattacaggcatgagccaccatgcctagtcaaaaggtactttgtggtggactaaactatgttcccccaaaagatatgttgaaattctaacctctggtacctatgaatgtgaccttatttagaaacagggtctttacagatgtaatcaagataaaatgaggtcatactcaattagggtaggtcctaatccaatgattggtatccttattagaaggggaaatgtggacagagacacacagacacacgggggacaccacgtgacaacaaaggcagagacacagagttgtgtttccaagtctccaagccaaggaacaccaaggactgtgggcaaccaccaggagcagggaagaggcaacgaaagagtcttccctagaccttcaaaggaagcatggccctgctgggaccctgacatccccagcatcccaaacgattcttcggcttaaaggtcttacctctattttgttgtggttgtgttgagaggcatcccgatggtcccctgagaaacaaacaggacaaaacaaattgattctacacctatgtccagaggcccctccttacctggctttgcttatatagtgatggtggtaagaccatatacggcctggacaggctaaaatatttattatctggcactttacagaaaacgttagatgacccctggtctagatattcaaataccagtggctgtccctctccactaccttctcctaggggcctgaatcatatcctttgaaatgctttacctctcccaagtcagaaggactcacatatgtgagccacgtcctcagcccctcagtgccctaccatcttcactgatacttcttatgagaaaaggcactcacggtgcctacaagtaggaagtatatatgcatgtccctatatcattttaaacaattgtgctattaagtatatttaaaatagcactctatttgaatctagtattagccttaatattatctctaaatttacataaaattaaatttctaaatgtttcagaaaattagaactgaaatcaacttttaaaacaattggctgggtgtggtggctcacacctgtaatcccagcactttgggaggctgagatgggctgatcacctgaggtcaggagttcaagaccagcttggctagcatggtgaaactccatctctattaaaaatacaaaattagctgggaatggtggttcatacctgtagtcccagctactcgggaggctgaggcagaagaatcacttgaacccggaaggtggaggtttcagtgagccaagatcgtgccactgcactccagcctgggcgacagagtgagactctgtctcaaaaaaacaaaaacaaaaccaaaaacacaattgtaggccgggtgtggtggctcacgcctgtaaccccagcactttgggaggctgaggcagatggatcacttgaggtcaggggttcgataccagtctggtcaacatggtgaaaccccatctctacaaaaaagcaacaacaacaacaacaaaaattagccaggcatggtggtgtgtgcctgtaatcccagctacccaggaagctgagggaggagaatcatgtgaacctgggaggcggaggggttgcagtgagctgagatcgcaccactgcactccagcctggtgacagagtgagacactgtctcaaaaacaaaaacaacaaagaaaacaaacaattgtagtgaaatacacataataaaatttaccatattaaccgattttttgtttgatttttttgagtcagggtttcactctgtcacccaggctggagtgcagtggtgcaaacccagcccacaacagcctcgacgtacccaggctcaggtgatcctacctcagcctctcaagtaactggaactacaggcacacacaattttgctcactgcaacctccacctcccgggttcaagcgattctcctgcctcagcctcctgaatagctgggactagaggcatccaccaccacgcccaggtaatttttgtacttttagtagagatggggtttcatcatattggccaggctggtctcgaactcctgagcttgtgatccacccacgtaggcctcccagagtgctgggattacaggcatgagccactgtgcccggccagagatggggttttgtcatgttgcccaggctggtctcaaagtcctgggctcaagggatgtgcctgactcagcctcccaaggtgctgggattgcaggcgtgagccactgcacaccagtcaaccaatttttgttgttgctattttgagacagggtcttgctctgttagccatgctggagtgctgtggtgtgatcttggctcactgtagccttcaactcccaggcttaagggatcttcctgcctcagtctcccaagtagctggaactataggcatgcagcaccatactctgctaatttttaaaaatttttgctttgttacccaagctggtctagaattctgggcctcaagcaatcctcccaccttgacctcccaaagtgttgttattataggcatgagacactgcacccagcccattttaaccacttttaagcatacagttcagtggcatcaagtatattcacactgttgtgcagctgtttcatcttgcaaaattgaaactctgtacccattaaacagtaactcccaattcccctgactccagcccctggtaaccatcattctgctttgtctctataaatctgattattctaagtacttcatataagtagaattatacaacatttgtccttttgtgactggcttacttcacttagcataatgtccttaacccatttatgcctagtgttccattattggaacgctaagcatgtgggagttatttatatcctactgctcaaggtcatcaccaagttctgattgcaaaaattcaaaaaattgcaacctctggcataaacgagttcaggttcatctgtgttgtagcatgtgtcaaattttccttcctttcttagactgaataatatttcattgtgcgtatccacattttatttatccattcatccattgatgaacgcttgggttgcttctatcttttggctattgtgaataatgctgctatgaacataggtgtacaaatatctctttgagcccctgtttcagttcttttgagtatataacctgaagtggaattgctagatcatatagtaatgagacttctaattttttttttttttttttttttttttagacagagtcttgctctctcaccaggctggagtgcagtggtgtgatctcagctcactgcaacctctgcctcccgggttcaagcaattctcctgcctcagtctcccgagtagctgggattatagctgtgcgccaccaccacacctggttaatttttgtattattagtagagacggggttttgccatgttggcaaggctggtctcaaatccctgacctcttgggatctgcccacttcaccctcccaaagtgctgggattacaggcctgagccaccacgcctggctgtgagcccacttctggccactgtcctctcccacgcatgtgtccccagtgctgtccatggtgctcctctggtgcttagctggagaatggccctagcagcaggactctgcatcgagagggcaccagcaatgccaggagacaggctatagtccaagtaatgacctgcacacggcaggcagccccactcacccagaaaatgagtgacggcttccacttaccatatatctgcccgttgatacagcactttttaaaggtcatgatattttgtgtgagtgtccccgtcttatcagagaagatataatggatctgcccgagctgttcattgagtgtggtggttctagcttttgcgggtgtgtccttctcagcatagtacatttgcaggtcccagttgatgaagtgactctgtccaagacgaatcacttccacgctaggaagacagaagattattttccgtagagagctcggatacgagtggcaagtagtagagattttattctcattgtacagacgagagcaagctgcttatttactgctatggtctgaatgttagaatccccctccaaattcatatgttgaaacccaatccccaattcaacagtattgaggtggggcctttagaaggtcattaggtcatgagggctccacccttatgaatgggattagtgcccttattaaagtggctcaaaggagcttgcttgccccttctgccatgcgaggacatagctagaaggcaccggctgtgcctataaagcagaaagtgagcctttgccagaccctgaatctgccgatgctttgatttgagacttcccagcctccagaactctgagcaataaatttcgaaggtcttttgttatatcagcccaaactaagccctctacaaggagacaagcccatgcactcagcctctggtttctcctaaccacatgcatcattctcaggcttcagggtcaagctgattttagacaagtaatttccactcaaaattgctcagtgagatttcccactcactcctgggcacatttagccaaggcacccatgttcagaatacacagcccagcagaatggaagacacagcaacactgcagacagagcagtggacacagcaagcttgactcttcccccattccccatagcacccaggggcactggaatggccatgttcacctttgccctaagtggtagggcagagggagtgagagtaccctagggtacagactccactgtgctctcaaacagggcaaaaggcttttggcaaataccccaaatcatgatccctaaattatgataaggttatagaatatccaaaataagatattataaaaggatcatctgaattttaaaactataagggacattacctatctcagttataaggaagctgtttacatagccagcaattgttaggtgggccaaggaagtccttaacaagttaaacagatggaaaaatgatgctctccccacttctctcccttccgtaagtatttcctaagtgcctactatgtaccagataccattctaggtgcaggggacatgtctgtaaacaaaacaaagtcctttctcttaaggaggttactttctagtagagacagacaaataaattaataaagagaggctctatcagaggtgaaagttctctgcagaaaatcaaagcagggggccaggtgtggtggctcacgcctgtaattccaacactttgggaggccgaggtgggcggatcatgaggtcaggagttcaagaccagcctgaccaacatggtgaaaccccgtctctactaaaaatacaaaaattagccaggcatagtggcatgtacttgtaattccagccactaaggaggctgaggcaggggactcacttgaacccagcaggtggaggttgcagtgagctgagatcgcgcgactgcactccagcctgggaaacagagcaagactctgtctcaaaacaaaacaaacaaacaacaaacaaacaaacaaaaatcaaagcaaagcaaggtaaggagatatgaagatctccaggaaggagaagtggtcagaaacagaatgagtcaggaaaggtcagggtaataaggtgttgtctgagtaaaggcctttgtagtgaaaggggagcagatagatacctatgtaaggaatgcccctggcagagaaaagagcagggacaaaggccctgtgcaggaagaatatcaaggggccagagtggcagaagcccagggaggtgggctgaggtgcagaaggtacgggcggagtggaaggctgagcaccagatcacacttggggccctggggttgggtttattctgaatgaggtttgaagtcaaagcagagatactatctggaagaacttgctccagcatgttttcaaaggacctttatctccaagaaaaaagaaatcgtatttgtcacatgacatacctttatataaaattatgtatacagtttcttttataatacacattgatggttttaggcaaaattatctatgtaatagttcccttgacaaaggtaacactcaactcggtttttctcaaagtagctgtggaacagatggctgccccagggctttccttcatgttaaaagaacaacagtaactacatgtaatcaaattaaaaataaagcaaatgcacatataatgacactaaaataaaataaatgcctctaattataggtgtgtatgtgattcctatgtctctgggctattctttatcagaactaagaatgaactctggctgctgggtttattccaaagcactatccctcccaaaaaggtctcaaagtcagtttggccaagggcagtgaactttcatattaaaaagagaaaaaggccgggtgtggtggctcatgcctgtaatcccagcactttgggaggtgaggtgggcagatcacctgaggtcaggagttgaagaccagcctggccaacttggtgaaacctgtctctactaaaaatacaaaaaagtagccagacatggtgatgggcacccgtgatcccagctactcaggaggctgaggcaggagaactgcttggatccaggaggcagaggttgcagtgagcctagatcatgccattgcattcctgcctgggcaacaagagtgaaactccatctcaaaaaaaaaaaaaaaaaaagtaaaagtaaaaaatgaagaagtatcaccaaatcagctgcttaccacttatcggagatatgcccctgactttgttgttgtggttgagatttgagatgaaaaagagaacattttgagaggttgatgaaggacagggagtttctttcctactaggaggtagtggccggaaagcacaagttctccaccttgggtgtggcagatgataataaaggctcagataagaggtgaggaccacttccaaaagggaaaactaagtttttccatcacctgctaaatcttcccctcctcccagtccctttctgaagtctgggctttggaacccggtgagaagggaaccttactaataagacaatgactacaggagtagcaatcgatctttgaaattccctacccttatctgcaaacaggatgagataaaaggtgcctggcacagagtggatactcaaatgttaatttccttttcctctcttaccctcaattctgaaatgaacgtgattttcttacctgttctttgtgacctttgaaacagtgatcactagaaatgaaggcactatgttgggagaaggtacaacattcttccattaaagcaaaatgccagagaggacagccttacctgacatagagagagatgggtaccatggtgttgagaacaatgatatagccccagaaaatgaggaatccacggtaggagggtgtatcgtcttctccatcatagaggtaccaagaggaattgcccacctgtgcttcccaataagcatggccgatggcaagaccagcagaaagcagaataagaacaacaaagatctagaagacagaaaacatttaaatgcattctgaagatggatttccaacctcttgcatttcctagatgctaattaaccttactcaatacttcatatgattgagaatttagtagtctgaaaaataatatatgtcaaataaaaacagcactatcataacgctttgaaagtctatttgattgctgcaattgactgatgtatcctacatctcccatagaaggtaaggttttgttcccaaaattatctctccaaagagaaggtggtgtcttatattcaaatccttgaagaatcttatattacagggcattctctcaattacgtttactttgaacaataacatactgtttggggaagatatcttacttagcatgaaacaacttccaacaaggctgaactggaaaactggaatgcttatagaagatattcaacagatttttttttttttttttttttttttttttagacagcgtctcactgtatcacccaggctggagtgcagtggtgccattgtggctcactacaacctccacctccctggttcaaacaattcttatgcttcagcctcctgagtagctgggattacaggcacgcgccaccaaggccggctaatttttgtctttttagtagagacgagtttcaccatgttggccaggctggtctcgaactcttgtcctcaagtgatctgcatgcctcagtctcccaaactgctgggattacaggtggccctcacccagccagaatttttttttcagggcaagaaaatttcacctatatttgggcgattattccttaaggtgtaatgtcataagtattgcatgacattgtaaaataagatcacttaagaagcaatatgataagtattatgttgtagaagttatgagcatatatttatggaaggaataaaaagtcaaccatcctagtggtacttggagattcgcaagtgggaataaaatttccagagacaaatttaaatttctggacatggagtccaaaagtgctatatctcacaactttgtcgtggaaagagcagagtgccaaacaggctctttgagagtggataaccacaaccatgacaccaaagatgaatgtgaaaagttcaaatacaattttcatgaaatgagaaagcaggggaaaatgtttcttaaattattatttttatgtgattttaaacatgtatatgcaatcaaagaataagttttagaagtatgcattcaaattgaattaaatacttgaaaaaatttttcattgggaaatagaaggagtgcttaatatttggggtcaccacgtgggcagaaaagagcaaacatagcaggtctgagactgcttcctccgaaggccggcttgcaaggttcgccctgggctggtatctggtaacttagatgtttggaggatttcccagttattttttattctctgataagaatagctcatgggccgggtgcagtggctcatgcttgtaatccaagcactttgggaggccgaggcaggcagatcacttgaggtcaggggttcgagaccagcctggccaacatggtgaaaccccgtctctactaaaaatacaaaaattagccaggtgtggtggcaggtgcctgtaatcccagctacttgggaggctgaggcaggagaatcacttgaacctgggagacggagattgcagtgagccaagatcatgccattgtactccagcctgggcaacaagagtgaaactcaatctcaaaaaaaaacaaataataataataataaaaaaactcatgatgcctaactgtgcaaacagcatggtttatgctgaccatctgcattcttttggggagtctagagtttttttgttaaaaacctttgacactgagtctctcatgagcttccctggtatagacaacatttcacatgtggtgtcattaattgctgctgggagaattaagtgcctattgtgtgtgtggtttggtggggagtgggggcaggacggccgacttttggaagcttgtgcctggtttcctttgcactttgctccatgagtctttggtgatcttgctctgtgtccttttgttgtaatgactcacagctgtgaatacgactatgtgctgaggcctatgagtccttccagtgaatcatcaaacctgggagtggtcttgagtgtcctcgacatactttatttttagccttgccttgtatttggagctatacagtatatgttgggggtgctgggggaggcttgcttctaagagaactgcctctatgggaaagtaacagcaatgaaatcaaccctacattgacttcaggagtccagcttcactaatttatctagggcttcctggttttccagttcccgtcatcaaagcactcagggcaccctacaaccgaaatttcccttcccaagggaattctcctgttaaaagtgtggcatttctgagaaaaagtaaggcatttctggaaaaaaaaatcccttcttcctgcatttgaagcttggagtgcccaataatttttctattccacctaaagaggtaagattttgtattagaaaaacatacgataatattagtgcaaaagacagcaatctagatgagagatctactgagatgaaaaataaataccgtgtaaaccatgtagttcatcaagtaatcaattttagttcttttaaatctggttttcccactattcttcattattttagtgtcagcacctgaaaatggaaaattcaatgtagtcatcagttgggaaaaatcaattcactagctcaccaataaaattactcttcttggccaggcatggtggcttacgcctgtaatcccagcagttttggaggctgagttgggcggatcacctgaggtcaggggttcgaggccagcctggccaacatggcaaaaccctgtctctactaaaaatacaaaaattatctgggcatggtggcacatgcctataatcccaactactctggagcctgagacaggagaatcacttgaacccaggagacagaggttgcagtgagctgagattatgccactgcactccagcctgggctacagagtgagactctgtctcaaaaaaaaaaaaaaaaaaaaaaaaaagctcatgatgctattactcttcttttggttttgatggacaaaggacagaaaagcaatcccctctaagtctttaaagatcatagctgattaatttcccaagaaactctgaacgtacctgcaaaaatgactaagccgtggcagaaatcggtgttcctaattacacagccacgtaacaaaattttatcagcatccaaaggaaaacttgtgtttctccaaaatagtgttcctgtaaacttatctagtctgttattgggttcttcacattcaataaaaccttttaaaaatataagattcacataattaatcacatacaaaagtctttctggttttaatcaataggaattgaaccaagcaactaaaatttaaagcaaagtaagacatgtttggtacaaaccatcaaatgtagccaatgtatcttctctttggaggtactggtctgtgatttcaagtgacatcttaaattttaaattggtttctctaaaggaatggggaaaaaatgaattaaatgaacaaatttttgagttcaaagtggaagttaatcatccaaagttacattagccatacctggacatgaagcctaaataattagctgtttctattttcaaactctgttcaccttggaacttcaggtttggaaaaggttatcccctgaagtcgagaaaatttctgaccttgggaaatgttggttcccttcactgtttgttgttgtgaaggttaggacagaggtacccacaaacatccttctcattaactttaactttaccatcagctaggactaccaaagtgctgtttgaaaatgtagtgtctaatatttaatcacattaaaatgattctataacacatatttgttacagaaattctgtttcgcctctgtcaaattcttttccagagtgaataactggatcacatgtttttgaaagacaattttatttggaaaaggaagtcttagctttactcccaactgccccaccatagtgcaaggtaaggtcgtgggtgggcacaagggcaggccggggcaggtgctctcaagggtgaggctgccgtctcacgactgaaggctttatataggattcacgaatactcaggaattttccctagggaagttcattctcaacctcaccattctgttctggcagggcatgttaggatcttatgtctttgtaaagctttagaatctctcatggaaataatagcagttttatagttgagaataaacagtcgggcgccgcggctcacgcatgtaatggcagcactttgggaggcagaggcaggcagatcacttgaggtcaggagtttgagaccaacctgacaacagaaagctctatcaggcaactgcccataatccaatttgggtatagcctcggggccttaaagagaatgcagtgtctttgtcagttaagcctttacaattaagaagtggttaattggtttttaaccaattagcctgtacaattaagaagtggttaattggctttaagtatttttttccgccaaaaaaaaaaaaaaagtgtgatagatttccaacagtcaattgcctgatctatgaagcaatgacagccctagttttcagtctcatgatttccgctctctgtaaagcagtgtatgcacatctggagcgtgaggcgcgaggagcagagggagcaatgtcccgactctaccacttactgtgtgaccttgggcgggctgctgcacctccctgggcctccgattcctcatgggtaatacagacgaataatattcgtctcacatggtcgtttagaggattaaatgagctaatatgtaaagtgccggcaacctcgtgagcactcaataaatgccttgaaaactggtcagaaaactggtcaaaaacagaacttcattctcttttaaatgatagcatagtaaccaaaaccaacacaaggagaattcaaaattgcctcctggggccagctgctgtggctcacccctgtaatcccagcaatttggcaggccaaggtgggcagatcacttgagatcaggagttcgagaccagcctggctaacatggtgaaaccccatctctactaaaaatgcaaaaattagctgggtgtgggggctggagcctgtaatctcagttactcaagaggctgaggcaggagaattgtttgaacccagggggtgtggaggttgcagtgagctgagatagcaccactacactccagcctgggcgacagagtgagactctgtctcaaaaataaataaataaattgcctattggtaaagactttaaaaatctgttcctttctctgacacagataataacctcgatattattcatatctgtctggacgctgctcagcagttgataaagggctcagacacatatgctcctgtctgatccttttaccttccctgagaggtggagaaacgcaggtagtaagagctccacttcacagaggcgcaaaggtgagatcagtagggacagcagcaggtggcagaggcaaggccagatatcaagccgtctggtccacaatgccccgatttcagtggaatgaatgtgccttcaaaggccagctttaaatcaggcccatcgagacacacttacccatccagttctgctgtttccacatagcagaggctgttaggctcagagctagacagcaggagaatgtcagcctgtccaaaacaaaacacacaaataacaccgagaccctgagggaaaagccgagcacaggggctgggggagaacaaggaacaagagaagcagaatttgttcacttactggaacaaaatcattttttttcagacgaatgacgtctccaacttgaatttctttccacttagcaactttgaacctaaggattaaaaataatgaggatttattgacattttaagttacaggcaagggaattactattctttctggatgttatagattctggaaaatatgcaagtcacagagaaaatgctaaaattttgctctttaatggatgtaaacatattaaaggggggcatgaaaattgtattgacctctgaaggaagcaatgatgaatgactttgatacattcttttcatctaggtcatgtaaggaagagtttatgggggccacttatgtgcgtggcagggaaatacttgccacccccttttgtttttgcttatgtccaacttgcctccctgctgtgttccttctcagtgacccatcacttgctccatgctggtcccaggacagaagcacctacattatggcacccacctgggcctcccagagtcttcgtggggcttcagagcttgcctactctctgctgtttaaattatctttattatttatttattaattttttttttcattgagacagagtcttgctctgttgcccaggctggagtgcagtggcacgatctcagctcactgcaacttctgcctcctggggttcaagagatcctcctgcctcagcctcccgagtagctgggactacaggcacgtgccttcacgcctgactaattttttagagatgagtttttaccatattggccaggctggtctcgaactcctgacctcaggtgatccacccacctcggcctcccaaagtgctgggattataggcatgagccacctcacctggccggttaacttcttaattgtaaaggcttaactgacaaagacactgtattccctttaaggccctgaggctacactcaaattggattatggtcagttgtctgatggagctttgtgttgtcaccacaacttgtgtttacacagccccttcagcctccctagggcatcattttcagggctttgctcacgtcttgacatctttccccacattccctcgctaaagtgaattttcccttccctgtactgtcagagcattttgtttttatcttttttattctgatatggattttattagaatgatgtgtgtaggtgtctcatcttctgtcttgaactataaatttctcaaggatactgtcctgcctccaacatgcagaaagtactccataagtgtttgttaaattaacgtagtcaactgtgacgaaagcaccaactcagggatcagtaatgagttgttttttgagcaggaggcttcaggcagaactgcaaattcaagtgctaaaaatagtaactaaggcctcattccaagactttttatgtgtcaacactgaggaaagtaacctgacttacagccgtacttccactctaatgcaaatatagactataccaagctataaatatgtttagatggctttttttcctttgcaaataagaaaattatgttccaaagttacctttcaagtgtcaaaagacaaaatcacaacaatttaaagatcttaattggctttatttacaattctaggattaggaaacacttcattcagtaaaatagaataagtgtcccaatgagcctagcagaggaggttgttgttgttaagacaggagtctcggccgggcccggtggctcacgcctgtaatcccagcactttgggaggccgaggtgagtggatcatgaggtcaggagattaagaccacggtgaaaccccatctctactaaaaatacaaaaaattagccaggtgcagtggcgggcgcctgtagtcccagctactcgggaagctgaggcaggatgctgtgaacccgggaggcggagcttgcagtgagcggagatcgcgccactgcactccagcctgggcgacagagcgagactccgtctcaaaaaaataaaaaaaaagacaggagtctcactaagttttccaggctggcctcgaactcctggcctcaagtgatcctcctgcctcggcctcccaaagtgctgagattacaggcgtgagccaccgtgcctggccaacccatatgtttagcctgtaccatacctacctacactggtaaagaggagctctgggttgccttgaatttggaagtctagggtgcatgtctggcagggccatggcctgagcagcccctgcagtggggtcacacctataggaacttgagcattagcagggtagagcacagggggcctcctcagaggaaactggaacatcggatagaagaatctaacagaattgcctccaatatttcagtattcagaattgccttccagtagccctgctaagaaggtgctggcctatccatttgtcatttcggacttacatgcaaatttctattttaaaatttcagaaatactgaaatgtaaaacatctacaatttcgtcaattgaaagataagccaaattttttttttaatgctggagttaagaattgtatactaaattcattaggggaactggggcataaacatatatttaaaaagtattttaaatctccaagtcatttttggccataaatgaatggcagataaacacatagtgattagacgactgcctccagtgaaattaagtttattatttatagcaggttcattacgtccactgggtatatcatttgtatatgtgaaaatctttaaaacaatattatagtttaaaacttttaaaagtgttgatatgttaaaaattttaatgaatatttcctatggaatttagtactcaaaatagtcatctttttatctatttttatcactatccttattagatttattacaacaggggtacatactcattaaaaagataatttaaggccaggcatggtggcttacacctgtaatcccaacactttgggagatcaaggaggataacttgaggtcaggagtttgagaccagcctggccaacatggtgaaaccccatctctactaaaagtacaaaattagctgagcatggtggtgcacgcctgtaatcccatctactcggaggctgaggcaggaaaattgcttgaacctgggaggtggaagttgcagtgagccgagataacgctactgcactccagcctgggcgacagagcgagactctatctcgaaaaaaataaacagttaatgtactaatagccttctacattgtaataattatctctgaatgtgtttctaggcagagttatgcattacatccttgaaactcagttactaattagacacagtacctgccatccttaatgacttcacacgtcctattgttgatttccttatccattttatggcgagccttgagaaggaagatggggaaatgctgttttaaacatctcaatagagaaggaaggcacgagaacttaaagtcaactcaaagcaatgagtagaacgttgtatgagaaatcctcaccacatcgtccaccaggtctttgattgcagtgacgcccagcaccacaagcaggggcactagtgtggtgtaccaagccagggtagagatttgaggaactgcctaaaagaataaaagggcttatgtgtgtgtccatgaaggcatatcaagcttacaggtaacttattgctaattctaagcttgctaattccaagtctcatcaccgtcatcacataagtctacatcctgcagagtatataggaaaggctcttcaagcatttggacaacctccttctagtggttctctctagcttctggatacctggaacagagcctagagggcagtggctcctgaaattatctcattgcaaacttaactggacaccaaggaagttttgtattatgatacctaaaaaagagttgctctaaatcttttgtgaaaatcatatttaactgggggtgagggggtaggagtggcaagggagaagtctcgtcttaactttttttttctttttttttttttgagacagagtctccctctgtcacccaggctggagtgcagtggcacaattttggctcaatgcaacctccgcctcccaggctcaagcgattctcctgcttcagcctcctgagtagctgggattacaggtgtgtgccaccacccccggctaatttttttgtatttttagtagagatgggttttcaccatgttggccaggctggtctcgaactcctgacctcaggcaatcctcctgcctcagcctcccaaagtgccgggattacaggtgtgagccaccgtgcctggccaaagtcatcttaacttttaaggaatgcatgcatagtaggttctatactgcaggtttctcagtcagtggtttctgaggatcccatgctgaaggcaatgatggcaagaggtactagctgcctctgaaagtgagggattagggagagcatctctgagggcattagaagaaagtgcttccttcatgatcatcactattggcctatccaagaaagtgagctggccttcctccatcaagacagcctctaagtttgaacaaagattgggatgcaagtttaataaagttatttcataaccatcctcctgatcactgggctgtataatgtagtggttaaaatgacaggctttggagtcaactcctagatccaagtcttggtcagctctatcatttatggcttatgggactttgagcaagttactttagcttactaggcctcagcttttctctgcaaaatggaggtcatgccaggcctgaccttctagactagaagaattaagtgtagtgacaacacaagttaagaagctgcctacggctattactgttaccctaatttggattgctgaccttaagagaagataactgcgccaggcacggtagctcatgcttgtaatcccaacactttgggaggccgaggtgggcggatcacctgaggttggaagttcgagaccagcctgaccaacatagagaaacgccgtctctactaaaaatacaaaattagccaggtgtggtggcgcatgcctgtaatcccagctactcaggaggctgaggcaggagaatagcttgaacctgggaggcagaggttttggtgagctgagatcacgccattgcactccagccttgataacaggagcgaaactccatctcaaaaaaaaaaaaaaaagagagagagaagataactggggtgcagttagaagacaaaaagatccttcttcccacatcacagtgaatatgtgaaactcctcttccctgctagaaggaagtaagggaaaatggtctacttcctacagagcagcaccttggagtttgcagtgctaacctctacacacacctttctaagcatctcctttgataacagggccatcctttactatctgacttgaaggtcttacagtttcctaaatcattgcctatccatttctccttaccatcgtctcttctttttctctcctctccacgcatcctccatccccacctagacacacattctaccccattttcataaaaccttaaagggtcaatcccagcaggtataacttttccaaatccaatgcttgccgtaaagaatctgataaagtgccgggcgcagtggctcatgcttgtaatcccagcacttggggaggctgaggcgggtggatcacctgaattcaggagtttgagaccagcctggtcaacatggtgaaaccctgtctctactaaaaatacaaaaattagctgggcgtggtggctggcaactgtgatcccagctactcagggggctgaggcaggagaatcgcttgaacccaagagaaggaggaggaggttgcagtgagccaagatggtgccactgcactccagcctggacgacaagagcgaaacacggtctcaaaaaaaaaaaaaaaaagaatctgaaaaaaccaggtggatattctgagcttaagctatgtaatccgcacggcagacactaaaggttgattctggcgctaactagtgtgtgtagagttccctcggttacagcaacagttcttgcacagctaaactcatgctctctggataactggatgctttgccacaattaggaaaaaaaatttttaagtaggccttttaaaatgtaaaaacagttcacaaaaataacttactgaaatttatgaccaaaattttaataaaaaatcaatgatctttttgggggggaaattcagcatctaactacaatgataaaagacaagcacaaaatagctttaattttaaggtgcaaataattttacaaagtaaggattttattttatttttttttaagatggagtttagctcttgttgtccaagctggagtgcaatggtgtgatctcggctcactgcaacctccgcctcctgggttcaagcgattctcttgcctcagtctcccgagtagctgggattataggcatgcaccatcacgcctggctaattttttgtatttttagtagaaacggggtttaaccatgttagccagggtggtctggaactcctcacccgaggtgatccacccgcctcggcctcccaaagtgctgggattataggcgtgggccactgagcctggctggattttagttttattcacttcagggataccaattttaacacccatatcagtataacatgaaattttttaaaatacagaattagaataatatttccatttgctccctttccctgttcatataacactgattgagctggttctgtgtatgaggcactgttcctttatgtacagaaccctgatgctaatataaaacactttcaagattattcacattatatgtgtctacagcttaaatgttatcgagtcactataattcaaacagatttaagatagcaaagggcattacctgtaagataagaagagccaggaaatataaattggctgctctcttaaactgctcaaacagattcattggtataaaggtaaatgcgttgtacttgtatgttttaattgcattattctgttggaaaaaataagagtcattctaaatgatgctgtatttatcacaatgtatacacatctgcaaaagtcacaagtcccacagcttacagtgacaaaggaacatcatctgtcagaaagatattgaggattttgtctgggtgcggtggcttatgcctgcaatcccagcgctttgggagaccgaggtgggtggatcacctgagcctaggagtttgagaccagcctagccaacatggtgaaaccccacctctactaaaaatacaaaaattagccaggcgtggtggcctgcacctgtaatcccagatacttgggaggctgaggcaggagaatcgcttgaaccagggaggcagaagttgcagatcgccccactgcactccagcctgagtgacagagtgagactctgccttaaaaaagaaaagaagaaagaaagatactgatatttcttttaagcttttaattctagccaagcagccaagcctcaaaatgactacttggagtcttatgacagaggcagtaacaagaaacagacatcagactgtgaccaaataaatcctgctgtcagattccttgacccattagagactgttagaaaacagggtaaaggtagacaacaacatggccaaagccaggaaaagtgaggcttttatttaagtgaggagacagagcctactatgtaagaaagagcaaaaggtactgtagtgggttgcattgtgtcctgcaaaagatatgttcaggtcttaacactaatatctatgaatgggatcttatttggaaataggatcttcgcagagataatcaagatgaagtcatacgtgattaggacaggctctaatttaatgaggtgcttattcggactggggtccctataagaggaaagttgcacacagacacacacaggaagagtgccccttgaagatggaagcagagattggggtgacttcatctgtaagccaaggaactccaaggattgccagtggccaccagaagccaggggagaggcagggaacagattctcctgcagaggctccagaaggagccaaccctgccaacaccaagatttcagacttctgatccctgcatcaggagagagtaaacttctgttgttttaagccatccagttgtggtactctgctatggaagcccttggcattaaaacacacatcttacaacatttaagcccacacttaatatttattattattattattattgagacagagtctcactcctgtcacccaagctggagtgcaatggcacaatttcagctcactgaaacctctgcctcctgggctcaagcgattctcttggctcagcctcccaagtagctgagactgtgggcacatgccaccactccaggctaatttttgtatttcgcatttaatctttaagcattctttatcacattccaaaggtaataagcatttttgagtcaaaaatatgtttaaaatctctaaatccattccaggcagagaaggggaagataagttcttaagagattcctttcaaactcattactttcaaacaggaggcttctgtgccatcattgtatattctttcataaaacatttctaagagagcttaaaatttaaaaaagagagagaaaatttcaatctacataattctgttttgtttcaagtcacccgctacccaccccaaaggtaaacatcaataaaaatgacattctatagaaacaatgatgattatcagtagccccaggcaggtggttacgtggaaggcaggtgtagcatgaaggtagtaagcatgccagctactggaaaaaactgcattttaatgaaaacaattcagaaagttaacaactcaccgcatatttactctccttaatacacaagaattttgtgttcataaagtgaggttgttcgtggtacttgcgatcgtttgctttgacttgccatgtacattctttaaaaaaaagggagaaaagttcgtaagtagcaaattaacatgttgttatgagttgaattgtgtcttccccagattcaaatgttgaagtcctaaacctccatccctcagaatgtgaccttatttggaaactgctcattgcagatgtaatcaaattaaagtgaagtcattagagaggaccctaattcaacatgactgatacctttacaaaaagggaaatttggacacagagatagatggaagacgatgcgaagtcacagggagaaaatggccatctgcaagccaaggagagaagcctagaacagatctctcccttgtagctctcagaaggaatcgatcctgctgacatcttgatgcctcgaggaaggcataagcatgctgctgctatgaaagctggaggcaagcatgctataaatcaggaagaaaatgaggaagcaggccgggcgcggtggctcacgcctgtaatcccagcactttgggaggccaaggcgggtgaatcacgaggtcaggagttcaagaccagcctggccaaggtggtgaaaccccgtctctactaaaaatagccaggtgcagtggcgggcacctgtaatcccagcttctcaggaggctgaggcaggaaaattgtttgaacccgggaggtggaggttgcagtgagctgagattgcgccactgcactctagcctgggcgacagagcaagactccatctcaaaaaaacaaacagaaaagaaaagaaaagagaatgaggaagcacctctttggcaccaagttctccatgaacatgcatgctggatgaagctcccttgagtgacgcacataatggagagaactaggtgttgatgaatccccaccaaattggcagagaagagaaattaacaatgagtgtggcacaactatttttggagatgggaatatattaaaagacacttgaaagtaaaaaattacaaaaatatcagtcttaacaactataataataaagattgtgtgatctcggctcactgcaacctctgcctcccgggttcaagtgattcttctgcctcagcctcctgagtagctgggattacaggtgcctgccaccacacccggctaatttttgtatttttagtagagacggggtttcaccatattggccagtctggtcttgaacttctgacctggtgatccaccagccttggcctcccaaagtcctgggattacaggcgtgagccactgtgcctggcaaaatgatgtattttctagactcctactccaaaggaaatatagacaatatggcaagagtaacaagtgtaggccgagcatggtggctcatgcctgtaatcctagcactttgggaggccgaggtggatggatcacttgaggtcaggagttcaaaaccagcctggccaacatggtgaaaccccgtctctactaaaaacacaaaaaagtaatggggcatggtggtgcatgcctgtaatcccagctactcaggaggctgaggcaggagaatctcttgaacctgggaggcagaggttgcagtgagccgagatagtgccactgcactccagcctgggcgacagacggaaactctgtctcaaaaaaaaaaaaaaaaaaaaaaagtaacaagtgtagactattgaggaatgcaaataattaacctgattgcttttttaaagccacaatatcactattgaacatttttctcgcatcattttggctgcctttcatcgggtaatcataacagttgtgttattacaaatgaaaatgttcctggtatctttgtagctcaagtgcaatcttatcaaaagggaaaataaaaatggaaatataaagccactcataagcactgtaatcacataggcaatcagaacagctcattccactcaaaaaggcgttctcaaagtaggtagataagaccttacataaggtactcttgaatccattctatttggtggtaatttgcaaatgcatgtgcttttaatggtttactttagcacacagatgacttgtgacacatccccaccaccagggttctagaacactgttcagaaccactgttacgcatttcaggaaggctgagaagaaaaacagacaagatttctcaagaagacagaaaaggccaataagggatttttaaaaagtcaattttagaaataactcaagtggaaagaagaaactgccctgttaaggagctggacataatgatctttcccagtccacttctggtccatcccccttgtggctctataaatttgcttcataattaagccaccagctggtggtggctctgtctggtcccagcactataccctcatccctggccaattttgatttggatgattcagacagagagggtggcatcagacctcgagtaggtgcagtgaggggttaccagaaatgaccttgatctcttaattttacacttctgccaatactgtggggagcctggagaaagtaaccagtatgtctttgtctgcaattgaaccgcaaacacgtttttactcaattttagaaatctgactgcagtcaagtaatcaataaccctatttccagttaaagatccttgtttggcctaattcagacaaatcaggggacaaacaaattgatgtctactctttattcatctatgagtttaggctaattgcttgagctgtatttcaatgagataccatgaaaatatgaaaacagagctccatggacagacacacttgcagaagacagcaccttgcaaccctctcttggaagttcggtggatttgcttgtacattaaaggctgtgagaagtcctgtagtaaataaactgattttattttataagttaaatgtttaaaatgctttaatatttaaaatagcttttccaaaattaatataatcataggcactttttaaaaaatcacagaacacttattaacatcagttaagaagtgctgcactgatacacatgcctttaggaagggcagcaaaacagcacgtggaggaattgacctttttgagcaaatatttattttaagtgtctgcttggaacagagaactttactggacacttgaactacaaagataatttacagaaagagtaagcatcttgccccattttctttttttgtccttttttctttcttttttcattttttttttgtttgagacagtcttgttctgtcatccagggtggagtgcagtggtgcgatctcagctcactgcagcctctgcctcccaggttcaagcagttctcctatctcagcctcccgagtagctgggactacaggtgcacaccaccacgcccggctaatttttgtatttttagtagagacagggtttcaccatattgatcaggctgttctcaaactcctaacctcaggtggtccacctgcctcgacctcccaaagtgctgggattacaggcttgagtcaccatgcctggccactttttcttttcttttctttttttttttttttaagagacggagtctcactatgttgcccagtgcctaggctggcctcaaattcctgggctcaagtgatcctcctgcctcagccttcagagtagctgggattacaggcatgcaccacactgtgcctggctcatctcattttctagaatggatatattgacaaagaaaagagaagaaataagaaatgcaaaaaatgcaccttcaccatatggccctttagctaaaagctacaaagctaacaagggtgtgccatcagaactatccatgtacatgtacagagatgattttaacagctgccatgtgacatgtggcttaaagtcaccctgagtctactaaatggttgtgttgtcaatatatctaaatatggctacgtgctctccagagtgttcccatgatcaccacgtcctttgatcagtgccatctggaagagcagatgagtgcagccctcctctcatcctctctgtgctggctccgaacgcttgcttacagacccaccaacaaccaagaagctgcactggttggtacacactgcagcaaacaaggaaaacaagtagataaaaagtccaacatcaaaaagaaaaaaaaaccatagaaacaattgaagagagaatggctaaaggacatgaaaagacagttcatacaaagggaaattcaatgctgttctcgctgaggctggagtccaatgatgcgatctcagctcactgcaacttccgtctcctgggttcaagagattctcctgcctcactctcctgagtagctggggttacaggcgcccaccatcatgcccggctaatttttgtatttttagtagagaccgggtttcatcatgttggccagactggtcttgaactcctgacctcaggtgatctgcccacctcggcctcccaaagtgccgggataatgggcatgagccactgtacctggcctcaaatggctcttaaacctgtgagaagatatttgggttcctaaaagagaaatgcaattcttcactgagatagtagtttttatcctataatagcaaaacattggcacatggtaatgcttgggatgacattctaggttcaaaagagagcagagaaacagacactctgaggtagcctttatggagagtaatttggccagatctcaaaatttaacacacacatgcactgaccaaataatcacacttctaggaaatatcccccatgtacctactgcagggattttcaatgcagccctatttatcagaacgactagaaacaacccaaatgcctactgggaacagccagttaaacacgattacaatgatagcctatgcagtcagcaaaaaaagaatgaggtgaccccataaatatggtaggaattacctccaaattacactgttaagagacaaaagcagaagggtatctaccatcttgtgctttcagctgtgtgatgcatagaattcatacacaatatgaatgcatatatgtacacacacgtgcacatctgtttctgcatatgtgtatgggtatatgaggaagcaagtttgcaagcattctttgcgcatacaaacgtgtatctctctggaaggacatattttgagaaactggtaaccgtaatttctttttgtcatttttttaaaagacaaagtctcactgtggcacctgggctggagtgcagtggcatgctcatagctcactgcagcctctgaactcctgggctcaagtgatcctcccacctcaacttctggagtagctgagactaaagtgcacgccatcgtacctaatttttaaatttttttgtaaagatgaggtcttgctttgcagaccaggctggtcttgaactgctgcccacaagctatcctcctgccttggcctcccagagtgccgggattacaggtgtgagccaccgtgcccagaccagcagtattttttttggaaaggaaactgcatgactgagggacaggagaggcaggaaggaaaacttcattttcattctggacccttttctaattggatcatttacatgtattactgttttaaagcaatgtttgtgattcctctccttccctctattggcatatatatatatatatatatggcgaatatggagaggagcaaggtggccaaatagaagctcgcacgaattgtaattcccataggaacatcaaatttaacaactatctacaaacaaaaaagcacctttataaaaaccaaaaaatcaggcactcacagtacctggttttaactttatattgctgaaaaaggactgaagagggtaggaaaaatagtcttgaattgccaatgccacccctcccccagccccagcaccagatgtgtggcatggagagaaaatctgtacgcttgggagagggacagtgcagcgattgtgaggctttgcactgaactcagtgctgccctgttacagacagtagaaagcaaaagcaggctgaactcagctgatgccagaccatagagggagcatttagaccagccctagccagaggggaatctcctgtaccttggtcagaacttgaattctggcaaacctcgtcaccgagggccaaagtgccctggggctctaaataaaattgaaaggcagtgtaggccccatgaactacaactcttaggcaagtcctagtgctgagctggacttggagccagttgacttagcaggcacatgacctactgagacaccagccagagcagctagtggaatgcttgctcggcccctccccgccaacctcactgctccaaaagagacctcttccttctgcttgaggagatgagagggaggagtaaagagaactttgtcttgcatcttggataccagctcagccacagtaggatagggcaccaggcagggtcatgaggctgtttcaggccctagttcccagacaacatttctagacaatcctggatcagaagggagcctgctgccttgcagggcaaggacccagctctggcaggatccatcacctgctgatgaaagagcccttgagccctgaataaacagtagtgatacccagttaatatccaaggctgtgggccttaattgaggctaagatattctggctttagttgtgacccagcacattcccagctgtggtggccatggtgagagattccttccgcttgagaaaagcagaaggaaaattaaagggtgctttgtcttgctcttgatctttctctttctttctttctttctttctttctttctttctttctttccttccttccttccttccttccttccttccttccttccttccttctttctttctttctttctttctctttctttctttcttttttctttctctctctctctctttctttcttttcagagatagagtcttgctattttgcccaggctggagtgcaatggtgtcatctcagctcactgcaacctgtgcctcctgggttcaagcaattctcatgcctcagcctcctgagtagctgggattacaggcatgtaccaccatgcccagctaatttttaaaaattttttattttattttattttattttattttatttgagatggtttctcactctgtcacccaggatggagtgcagtggtgcgatctcagctcactgcaacctccacctaccgggttcaagcaattctcctgcctcagcctcccgagtagctgggattagaggtgtgtgccaccatgcttggctaattttgtatttttagtagagatggggttgcaccatgttggtcaggccagtcttgaactcctgacctcaagtgttccacccaccttgacctcccaacatgctgggattacaggagtgagccaccgcgcccggcctaattttttttatttttagtagagacagggtttcgccatgttggccaggctggtctctaactcctggcctcaagtgatctgcccgcctcagcctcccaaagtgctgggattacaggcatgagacactgcgcccagcctgccttgcacttgctaccaccttggccacagtggggtaaagcaacaaatagagacccctcttggggtccctgagtctaggccttaggttcttggatgacatctctggacttgctttttgccagaggggagctcactgccctgaagggtgactgaaaggatttaccacaagctgactgaagaggccataggcctttaccgaacatcagcagtaacctggcagcactcctcataggcctgtggtggtggtggacatggggagaggcccctgagcctgtggaaagggcagaatagtggaaaggactggctaatggtttgagtgccagctcagccacagtagaatagataggacaccaagcagatttctaaggttttggactccagtccatggctcccagatggcatctctggatctggctgcagcctgggggaactcactggcttgaagctagcctggctggcttcacaacagggcattgagggaacataggcagccagatcatggttacagtgggccatggcgagacccagtgtggtgccagcttcatgtctgacccagtacattctcagtggtgatggccatattggtgcttgtatctccacccccctagctctgggtggcccagaacagagggagagagagaaggagaaagggagaggagggaggggggaagggggagagagaaagagcaaaaaaagagagagagagagattgattctgtttgggagaaagtaagcaacaagaacaagagtgtgggcttgataatccagataattcttccagatagtctgcaagaaatgcagcgttattgagcttgggatgccccctaatgcagatatgggttcaatcataatatccaagttcttttgaatacctggaaatccttcccaagaaggatgggtataaacaagcccagactgtgagagctacaataaatatctaactcttcaatgcccagacattgatgaacatccacaagcatcaagaacatccaggaaaacatgacttcaccaaacaaactaaataagacaccaggggccaaacctgcagaaacaaaactatatgacctttcagacagaaaattcaaaattgccattttgaggaaactcaaagaaattcaagatagcacagagaagacattcagaactctatcagataaacttaacaaagaggaaactcaaagaaattcaagacaacacagaaaaagtttagaattctatcagataaatgtaacagagattgaaataattaaaaagagtcaagctgaaattccggagttgaaaaatgcaaccgacatactgaagaatgcatcagagacttttaataccaggattgaataagtggaacaaagaattagtgagctggaaggtaagctattggaaaatatggtcagaggagacagaagaaaaaagaataaaaaagaaagaagtacacctacaagatctagaaaatagacttaaaaaagcaaatctaagagttattggcattaaagtggaggtagagaaagagacaggggtagaaagtttattcaaaggataataacagagaacttcccaaacctagaggaagatatcaatatccaagaacaagaaggttgtagaacaccaagcagattaacccaaagaagactacctcaggcatttagtaatcaaattcctaaaagtcaaggataaaaggaaggatcctaaaagcagcaaaagaaaagaaacaaataaaatacaatggcactccaatacgtctggcagcagacttttcagtggaaaccttataggccaggagagagtggcatgacatatttaaagtgctgaaggaaaatatattcaagcataaaggagaaatgaagaccttcccagacaaacaaaagctgagggatttcatcaacactagacctgtcctacaggaaatgctaaacagagtacattaatcagaaagtaaacgatgttagtgagcaataagaaatcacctgaaggcacaaaactcactggtaacagttaagtatacagaaaaacccagaatagtataacactgtgactgtgacatgtaaactactcttcagtaaaatgactaaaagattaactgataaaaaatagtgactagaacaacttttcaagacatagtacaataagatataaatagaaacaataaaaagttaaaaagcagagggaggaagttaaagtgtagagtttattagttttcttttagcttaaaataatgagttattagacagtacttacaagcctcatggtaacctcaaatcaaaaaacatacaatggatatatacaaaataaaaagcaggaaattaaagcacaccacaagagaaaaccaccttcactaaaaggcagaagggaagggaggaaagaaggaagagaagaccacaaagccaccggaaaacataacaaaatggcaagagtaagtccttacttatcaatataacatcgaatgtaaatgggctaaactgtcaatcaaaagatatagagtggctgaatagatttaaaaaaaaaaaagacccagtgatctgttgcctacaacagacactccacctggactgaaaatgaagggattgaagaagatattccatgccaatggaaagcaaaaaagaacaggatacctatatttatatcagacaaaatagatttcaagacaaaactataagaagagacaaagtcactatataatgataaagaggtcagttcagcaagaggatataatagttttaaatatttatccaccttacactggagcacccagatatataaagcaaatattactagagctaaagagagtgatagaccccagtaaaataatagctggagacatcaacactacactttcagcactggacagatcttccagacagaaaatcaacaaagaaacatgggacttaatctgcactatagaccaaatagatatttataaaatatttcatacaacagctgtagaatacacattcttttcctcagcacgtggatcattctcaaagacagaacgtatattaagtcacagaacgagtcttaaaacattcaaataaattgaaataatatcaaacatctgactgaccacaatgagtaaaactagaaatcaataataagaggaattttggaaactatacaaaaacatggaaattaaacaatatgttcctaaatgaccagtgggtcaatgaagaaattaaacaggaaactgaaaaatttcttcaaacaaatgataatggaaacatgataaaccaaaacctgtgggacacagtgaaagcagtactaggagggaagtttatagctatacgtgcctacatcaaaaaataagaaaaacttcaaacaacctgatgatgcatctaaaagaactagagccaggtgcagtggctcacgcctgtaatcccaacactttgggaggccgaggtgggcagatcatgaggtcaggagatcgagaccatcctggctaacacactgaaaccccattgctactaaaaaaatacaaaaaacttaggtgggcacagtggcgggcacctgtagtcccagctgctggggaggctgaggcaggagaatggcatgaacccgggaggcggagcttgcagtaagccgagatcacaccactgcactccaacctgggtaacagagcaagactctgtctcaaaaaaaaaaaaaaaaaaaaaaaaaaaaaaaaaaaaaaaaagaactagaaaagcaagagcaaaccaaacccaaagttactagaagaaaagaaataataaagatcaaagcagagataaatgacattgaaacaaagaaaacaatacaaaagatcaatgaaacaaaaacggttttttgttttggtttggtttggtttggtttttttttggagacagagtctcactctgttgcccaggctggagtgcagtggtgcgatcttggctcactgcaacctccgcctcccaggttcaagcaattcttgtgcctcagtctcctgagtagctaggagtagccaggactataggcatgtgccaccacacctggctaatttttgtagttttagtagagacagggttccactgtgttggccaggctggtctcaaactcctgccctcaagtgatccacctacctcagcctcccaaagtgctgggattacaggtgtgagccactgtgcctggccaagaagttagtttcttgaaaagataaacaaaattgacaaacctttagctggactaactaaaaaaaaaaaaaaaaaaaaaaagcaaaaaaagagagacccaaataaataaaatcagagctgaaaaagaagacattacaactgttaccacagaaattcaaagatcattagtggctactatgagcaactatttgccaataaattggaaaatgtagaaaaaaatggataaattcctagatacataaaacctaccaagattgaatcataaagaaatccaaaacccaaacagatgaataacaagtaatgagatcaaagccataataaaaagtctctcagcaaagaaaatcccaggacccaatggcttcactactgaatactaccaagcatttaaagaagaactaataccaatcctactcaatctattctaaaataaacaggaggaaatacttccaaactcattctacaaggccagtattaccctgatgccaaaaccagacaaagacacatcaaaaaacaaaaacaaaaacaaaaagacctataggccaatatcattgatgaatgttgatgcaaaaatcctcaacaaaatactagaaaattgaattcaacaacacattaaaaagatcattcatcatgatcaagtgggatttatcccagaaatgcaaagattgttcaacatacacaaatcaattaatgtgatatgtcatgtcaacagaatgaagggcaaaaaccatatgatcatttcaattgatgctgaaaaagaatttgatacaattcaacatcacttcatgataaaaaaaatcctcaaaaaactgggtacagaacaacatacctcagtataataaaagccatatatgacagacccatagctagtatcaaactgaatggggaaaaactaaaagcctttcctcttagatctggaacatgtcaaggatgcctactttcaccagaagtcctagctagagcaatcggacaagagaaagaaataaacggcatccaaattggaaaggaataagtcaaattatccttgtttgcggatgatatgatctcatatttggaaaaacctaaagactccaccaaaaaactatcagaactggtaaacaaattctgtaaggttgcaagatacaaaatcaacatacagaaatcagtagcctttctgtatgccaacagcaaacaatctgaaaaagaaatcaagaaaataatcccattgggaggagccaagatggccgaataggaacagctccggtctacagctcccagcgtgagagacacagaagaccggtgatttctccatttccatctgaggtaccgggttcatctcactagggagtgccagacagtgggcgcaggccagtgggtgcgcgcactgtgcgcgagccgaagcaaggcgaggcattgcctcacctgggaagcgcaaggggtcagggagttccctttccgagtcaaagaaaggggtgacggacgcacctggaaaatcgggtcactcccacccgaatattgcgcttttcagaccggcttgaaaaacggcgcacctagagactatatcccacacctggctcggagggtcctacgcccacggaatctcactgattgctagcacagcagtctgagatcaaactgcaaggcggcagcgaggctgggggagaggtgcccgccattgcccaggcttgcttaggtaaacaaagcagccgggaagctcgaactgggtggagcccaccacagctcagaggcctgcctgccactgtaggctccacctctgggggcagggtacagacagcagtaacctctgcagacttaaatgtccctgtctgacagctttgaagagagcagtggttctcccagcacgcagctggagatctgagaaccaacagactgcctcttcaagtgggtccctgacccctgacccccgagcagcctaactgggaggcaccccccagcaggggcacactgacacctcacacggcagggtattccaacagacctgcagctgagggtcctgtctgttagaaggaaaactaacaaacagaaaggacatccacacagaaaacccatctgtacatcaccatcatcaaagaccaaaagtagataaaaccacaaagatggggaaaaaacagaacagaaaaactggaaactctaaaacgcagagcgtctctcctcctccaaaggaacgcagttcctcaccagcaacagaacaaagctggatggagaatgactttgacgagctgagagaagaaggcttcagacgatcaaattactctgagctacgggaggacattcaaaccaaaggcaaagaagttgaaaactttgaaaaaaatttagaagaatgtataactagaataaccaatacagagaagtgcttaaaggagctgatggagctgaaaaccaaggctcgagaactacgtgaagaatgcagaagcctcaggagccgatgcgatcaactggaagaaagggtatcagcaatggaagatgaaatgaatgaaatgaagcgagaagggaactttagagaaaaaagaataaaaagaaatgagcaaagcctccaagaaatatgggactatgtgaaaagaccaaatctacgtctgattggtgtacctgaaagtgatggggagaatggaaccaagttggaaaacactctgcaggatattatccaggagaacttccccaatctagcaaggcaggccaacgttcagattcaggaaatacagagaacgccacaaagatactcctcgagaagagcaactccaagacacataattgtcagattcaccaaagttgaaatgaaagaaaaaatgttaagggcacccagagagaaaggttgggttaccctcaaagggaagcccatcagactaacagcggatctctcggcagaaaccctacaagccagaagagagtgggggccagtattcaacattcttaaagaaaagaattttcaacccagaatttcatatccagccaaactaagcttcataagtgaaggagaaatcaaatactttacagacaagcaaatgctgagagattttgtcaccaccaggcctgccctaaaagagctcctgaaggaagcactaaacatggaaaggaacaaccggtaccagccgctgcaaaatcatgccaaaatgtaaagaccattgagactaggaagaaactgcatcaactaacgagcaaaatcaccagctaacatcataatgacaggatcaaattcacacataacaatattcactttaaatgtaaatggactaaattctccaattaaaagacacagactggcaaattggataaagagtcaagacccatcagtgtgctgtattcaggaaacccatctcacgtgcagagacacacacaggctcaaaataaaaggatggaggaagatctaccaagcaaatggaaaacaaaaaaaggcaggggttgcaatcctagtctctgataaaacagactttaaaccaacaaagatcaaaagagacaaagaaggccattacataatggtaaagggatcaattcgacaagaagagctaactctcctaaatatatatgcacccaatacaggagcacccagattcataaagcaaatcctgagtgacctacaaagagacttagactcccacacattaataatgggagactttaacaccccactgtcaacattagacagatcaacgagacagaaagtcaacaaggatacccaggaattgaactcagctctgcaccaagcggacctaatagacatctacagaactctccaccccaaatcaacagaatatacatttttttcagcaccacaccacacctattccaaaattgaccacatagttggaagtaaagctctcctcagcaaatgtaaaagaacagaaattataacaaactatctctcagaccacagtgcaatcaaactagaactcaggattaagaatctcactcaaagccgctcaactacgtggaaactgaacaacctgctcctgaatgactactgggtacataacgaaatgaaggcagaaataaagatgttctttgaaaccaacgagaacaaagacacaacataccagaatctctgggacgcattcaaagcagtgtgtagagggaaatttatagcactaaatgcccacaagagaaagcaggaaagatccaaaattgacaccctaacatcacaattaaaagaagtagaaaagcaagagcaaacacattcaaaagttagcagaaggcaagaaataactaaaatcagagcagaactgaaggaaatagagacacaaaaaacccttcaaaaaatcagtgaatccaggagctggttttttgaaaggatcaacaaaattgatagaccgctagcaagattaataaagaaaaaaagagagaagaatcaaatagacacaataaaaaatgataaaggggatatcaccaccgatcccacagaaatacaaactaccatcagagaatactacaaacacctctacgcaaataaactagaaaatctagaagaaatggataaattcctggacacatacactctcccaagactaaaccaggaagaagttgaatctctgaatagaccaataacaggatctgaaattgtggcaataatcaatagtttaccaaccaaaaagagtccaggaccagatggattcacagccgaattctaccagaggtacaaggaggaactggtaccattccttctgaaactattccaatcaatagaaaaagagggaatcctccctaactcattttatgaggccagcatcattctgataccaaagccgggcagagacacaaccaaaaaagagaattttagaccaatatccttgatgaacattgatgcaaaaatcctcaataaaatactggcaaaccgaatccagcaacacatcaaaaagcttatccaccatgatcaagtgggcttcatccctgggatgcaaggctggttcaatatacgcaaatcgataaatgtaatccagcatataaacagagccaaagacaaaaaccacatgattatctcaatagatgcagaaaaagcctttgacaaaattcaacaacccttcatgctaaaaactctcagtaaattaggtattgatgggacgtatttcaaaataataagagctatctatgacaaacccacagccaatatcatactgaatggggaaaaactggaagcattccctttgaaaactggcacaagtcagggatgccctctctcaccactcctattcaacatagtgttggaagttctggcccgggcaattaggcaggagaaggaaataaagggtattcagttaggaaaagaggaagtcaaattgtctctgtttgcagatgacatgattgtatatctagaaaaccccattgtctcagcccaaaatctccttaagctgataagcaacttcagcaaagtctcaggatacaaaatcaatgtacaaaaatcacaagcattcttatacaccaacaacagacaaacagagagccaaatcatgagtgaactcccattcacaattgcttcaaagagaataaaatacctaggaatccaacttacaagggatgtgaaggacctcttcaaggagaactacaaaccactgctcaaggaaataaaagaggatacaaacaaatggaagaacattccatgctcatgggtaggaagaatcaatatcgtgaaaatggccatactgcccaaggtaatttacagattcaatgccatccccatcaagctaccaatgactttcttcacagaattggaaaaaactactttaaagttcatatggaaccaaaaaagagcccggattgccaagtcaatcctaagccaaaagaacaaagctggaggcatcacactacctgacttcaaactatactacaaggctacagtaaccaaaacagcatggtactggtaccaaaacagaaatatagatcaatggaacagaacagagccctcagaaataatgccgcatacctagaactatctgacctttgacaaacctgagaaaaacaagcaatggggaaaggattccctatttaataaatggtgctgggaaaactggctagccatatgtaggaaactgaaactggatcccttccctacaccttatacaaaaatcaattcaagatggattaaagatttaaacgttagacctaaaaccataaaaaccctagaagaaaacctaggcattaccattcaggacataggcatgggcaaggacttcatgtccaaaacaccaaaagcaatggcaacaaaagacaaaattgacaaatgggatctaattaaactaaagagcttctgcacagcaaaagaaactaccatcagagtgaacaggcaacctacaaaatgggagaaaattttcgcaacctactcatctgacaaagggctaatatccagaatctacaatgaactcaaacaaatttacaagaaaaaaacaaacaaccccatcaaaaagtgggcgaaggacatgaacagacactaatcaaaagaagacatttatgcagccaaaaaacacatgaaaaaatgctcatcatcactggccatcagagaaatgcaaatcaaaaccactgtgagataccatctcacaccagttagaatggcaatcattaaaaagccaggaaacaacaggtgctggagaggatgtggagaaataggaacacttttacactgttggtgggactgtaaactagttcaaccattgtggaagtcagtgtggcgattcctcagggatctagaactagaaataccatttgacccagccatcccattactgggtatacacccaaatgactataaatcatgctgctataaagacacatgcacacgtatgtttattgcggcattattcacaatagcaaagacttggaaccaacccaaatgtccaacaatgatagactggattaagaaaatgtggcacatatacaccatggaatactatgcagccataaaaaaggatgagttcatgtcctttgtagggacatggatgaaattggaaatcatcattctcagtaaactatcgcaagaacaaaaaaccaaacaccgcatattctcactcataggtgggaattgaacaatgagatcacatggacacaggaaggggaatatcacactctggggactgtggtggggtggggggaggggggagggatagcattgggagatatacctaatgctagatgatgagttagtgggtgcagcgcaccagcatggcacatgtatacatatgtaactaacctgcacaatgtgcacatgtaccctaaaacttaaagtataataaaaaaaaaagaaaaaaaataatcccatttataatagctatgaataaaatagctaagaattaagtttaccaaagaagtaaaagatctctgcaatcaaaactataaattgattgcaatgatgcaagaaactaaagaggacaccagaaaaatggaatgatattccatgctcatggattggaatattgttaaaatgtccacactgcccaaagcaatctacagattcaatgcaatctctatgaaaataccaatgactgtcttcacagaaatagaaaaaaaatcctaaaatttgtatgggaaccacagaagacccagaaaagccacagctaatctaagccaaaagaacagaactgtaggaatcacactacctgacttcaaattatatgacagagctataataaccaaaacaacgtggtattggcataaaaacagacacacagatcaatggaacagaaaagagaactcagagataaattcatacatccttagtaaacttgttttcaacaaaggtgccaagaacatacattggggaaaggcagtctcttcaataaatgatgcaaggaaaaactgcatatttatatgtagatgaatgaaagtagaccccatctcttgtcatatgcaaaaattgaatcaaaatggattacagacttaaatctaagacctcaaactatgaaactactccaagaaaaccctggggaagtctgagcatggtggctcacgcctgtaattccagcactttgggaagccaaggtgggtggatcacaaggtcaagagatggagaccatcctggccaacatggtgaaaccctgtctctactaaaatacaaaaagttagccgagcatggtggtacatacctgtagtcccagctactcgggaggctgaggcaagggaattgcttgaactcaagaagttgaggttgcagtgagccaagattgtgccactgcacttcagcctggtgacagagcaagactctgcctcaaacaaaaacaaacaacaacaacaaaaaaaccacttgggaaactctccaggacactaaactgggcaaagatttcttgagtaatacttcacaagcacaggcaaccaaagcaaaaacggacaaatgagatcacaagttaaaaagcttctgtaaagcaaaggaaacaatcaacaaagtaaagagacaacagaatgggagaaaatattcaggccactgaattcattttaaatgatagattcttccccttgcctcatcccagaaccactctgtatcttcaggggctgggtccaggcacctagagagtttgtaaaaattccacaagaggttctgatgtacaggcaggactgagaacccccagttagtgcaaaggagagtgtcttcctatggtgacttctatcattaaaaatctacttctgaacttgggctgcaaagtagcaggaagaaaaccaccagctgagttaggtttccatgagcaagagattcttacccaaggttcaatcataaattacatgacttgaaagcaaattctctaaaatgagcatgttgcccaagatcttaaaaataaatagaataggccgggcacagtggttcatgcctgtaatcccagcactttgggaggccagggtgggcgaatcaccttaggtcaggagttcaagacaagcctggccaacatggcaaaattccgtccttactaaaaatacaaaaattagctgggcgtgatggcgggcgccggtaatcccagctactcgggaggctgaggcaggagaatcacttgaacccgggaggcggaggttgcagtgagctgagatcacgccacttcactccagcctgggcaacaagagcgagattctgtcaaataaataaataaacaaataaataaaaagaataaaataaaatgagatggcacagtatcaccacccttccccatcagtaatcactcagtgcaggaatacccctcaccctgcggctttacaagcatcaattactctggtgtttttaggctgtggaggtggatggtaatttacaaccgatcagagaaagaaagaaaataagtagccagagtagactcccatatgtggtatgtgccgaaaatggaaaattcatcttattaagtggaacagctccctcagcacttttcacagattccctaggatatcctacgattgatacgtttcaatgagccatctttatctgtgttttggttccaactaaatattaattcatagatgcgctaaagaccccacattcttaattccagattattttatgaagatatcactttaaggccgggtgtggtagctcacgcctataatcccagcactttgggaggctgaggctggtggatcacaagttcaggagatcgagaccatcctggccaacatggtgaaactctgtctctactaaaaatacaaaaattagccaggcgtggtagcatacgcctgtaatcccagctacttgggaggctgaggcaggagaatcgcttgaacccaggagcggggttgcagtgagccgatatcgcgcctctgctctccagtctgggcgacagagagagactccatctcaaaacaaaaacaaacaaacaaacaacaagaaaactccaaaaatacaaaaactagtgtttcccagaacacatgctgagaagtgtgttcatcaggaaacgacagagctcatcccatagcactgaaaacattcccgctcatttctgagaatctttgctgaatctttacacaaagggtaaagttactccactcgaacctgtgggcttatctttctccatggcacattctaacagcatgtttgtgcctgtccttccttctcacaaaacacaataaaggtccttctagtgaaaagtactctgaatgggtctctcaaagcacttgtttaacaggaaagcttagttgggctagaggatttcctttctttaaaaaaaaaagaaagcaactttctgtgctacaaccctcattaaagaaactagcgcagttcaggctgcttaggcagtgttttgctagaatgggtgctggtccctggtgttagtctggtggtacctcgcagggtgactcatgttctgatgtcttaaagaactgattctctgaaggaaattattcaggatgtgaaatgtcaagaaagacagatgatgattaaaaaaagaaagagaagtcagggtgacactgaccttaactgggaaattgcacaaatgagaatatagtgggaaaggaaagagggatgaagagggcaaagagaggaagggaggaaagaaggagagcagactggctgtgagggaggcagggcacatgggaaatgggaggaaagaggtctggcatttactgaacatcatctgtgtgcttgggaagggcgcagagaggtattagaataagaatttttgtaaaaagtcacaggcaaagtcatttgatatgggttttgagaagcgagaaccacccaaatcccctaggaatataaatcacccttggaaaacatgactaagattcaagactgagcattttttttttttttttgagatggagtctcactttgtcacccaggatggcgtgtagtggtgggatcttggttcactgcaacctccatttcccaggttcaagcgattctcctgcctcagcctcccgagtagctgggattataggtgtgcaccaccatgccgggctaatttttgtatttttaatagagatggggtttcactatgttggccaggctggtctcgaactcctgacctcaggtgattcaacttccttggcctcccaaagtgctgggattacaggcatgagtcaccacacccggccaagactgagctcttttaatgcccatataccgagggtagaaatctacaaaacgtatgacctgcaaactgaatgatcaggaaaggatcctaaccaccagaatgggcaggcagagttgtaaaaaaacaggggatgagagtttccacccactacatgcgtctctgacatttctgcaggcacccaatcccggtccctttgctgtgtctcggactacacatctgatggcgtgccaccaagcaccaagagcaaagttgaccctggaccccatggagccaattctcctgccaccccatcagatatctacatttggtagagattccaaaattgtgataggagactaagcagtgcaattagcggggaaaggaatgaggaagaagcatgttttattcactgtttgggcaatcaactagaacttccttgtaacttgtctggctgcttcagctttagctagttcaccaatatccagtctggacctgttatgacagaggccaccttcctgttcagattggtgggaattccattttctttctttctttttttttttttttttttttttttgagttggagtttcactcttgttgcccaggctggagtgcaatggcaccatctcagctcactgccacctctgcctgccgggttctagtgattctcctgcctcagcctcccaagtagctgggactacaggcacttgccaccacgcctggctaatttttgtatttttagtagagagggggtttcaccatgttggtctggctggtctcgaactcctgacctcaggtgatccacccacctcagtctcccaaagtgctgggattgcaggcatgagccactgtgcccggcaggaatttcactttaattttggtcaagtatcatgagtttagtaccttctgattcaaggcagaaggcacttaagctcaatcctcaacagcttgaaatcaaaaccagaaacccactctaagaggtaatccatctaaatgtttgctatggaaaggtagcggacacacaacatacaggagtcaatggcctccccacatttgggtgagatggggctcccggggtgcatgcactccccacactgagaatctccccacaggcagattctgtgaccagaacaggaagaatcattgcagaaacgggatttcatgcatatcacatcttctacaggttaaaattattagaaaaaaatagctcatccagatagcagaacccaagaaagagaaactagagggggggtttggcatgggggaaaaagaggcttctagaaagcctgcaagggcagaatggcagtaacagagacctcgggaaaaccagctaaaatccgaggcttctctgactaaggctgcagggaggcgtgtctggagcgctgaaaccagaacactatgatgatttctgtgaatgtgatgctaaggttgttcggctagaattttacggaacaccatggaggaaatattttcagcctgatatcaaatctggggtccagagagaaaagtctcagcttgctcatggagaagagctacaagagaagcccacatctgtttgccagggtgggagaaccagcaggagatgaaatagaaaagccacaaaagaaaaggcatcatggtaaaagcaagccatgttctactgccctcagtgatgtactgtctgcggtcacttacactcaacattggcagagaccacgtggtccacaaagcctaaaatgtttacttgctggccctttacagaaaaagtttgctggccttggtctagaccctgcctctgatgctggcctgaccctgggcagaccatatacatatatatatatacacacacacacacatacacaaggatggttatttatataactcataccgccaatttaacaatactaatagttaacatctaagactgattgatatgtatcctttaaaaatttctgggtgcagtaacatgcagattcttgcccgcataactccattttaagaatatatacactggctacgcatcgtagctcatgcctgtaattccaggagtttgagaggttgaggtgggcagatcccttgagctcaggagtttgagaccagcctgggcaacatagtgaaataccatctacacacacaaacacacacacaaatacaaaaattagttggacatactggtgcatgcctgtagtccagctactcaggaggctgaggtaggaggatcacttgagtccaggaggtcaaggctgcagtgagccgagttcacaccactggactccagctggggagacacagtgagaccctgcctcaaaatatatatatatatatatatatacacacacacactaacaaagaccttaatgtattttctctgcagaacttgtcagatatgctctcccagcccttcttactaaggacaatgggtacttgtccaagcccatccaccattctgtcagtcgcatcctaagaagagatcagagaagattccctcctagaccacgcaaaatagaccgatcatctttggcacgtgtggccatgacccacatgaggatttataagcgacctagtcaccgggacttcatgtggttaccttttctgaatggctcccggttctcctctgcttccctgttgactcggttttgttctggttcaacagcagacccctggtcatcaagttcatcttctgtttcatcatcactgtagggaaccacttcgtcattaggctgagaatcctcgtcaaatgtcgtttctgagtctctttctgtactcattctgctggcaaattggaactacctgcttaaaaggaaagagaaaccagagtgaattatgactcttgcccagtttttggttgaatactgcctgcatgctgctacaatgccccttttacagaacattgtctaacatgtaaatattctggaatagtacccccaaattcaacttgacatgaaaacaagaacaaaaccattcagtactgattaaatgcttgggtaagatttttttaaaaaatatggagctgcaaaccttttatttttaaacaagggtatatatatatatgtatgtgtgtatatatatgtatatatgtatatatatgtgtatatatatgtatatatgtgtatatatgtgtatatatgtatatatatgtatatatgtatatatgtgtatatatgtatatatgtgtatatatgtatatatgtgtatatatgtatatatatgtgtatatatgtatatatgtgtatatatgtatatatgtgtatatatgtgtatatatgtatatatatgtgtatatatatgtatatatatattcaaggcaatatttcaaattagggggtctcaatgaaataaatttagtgggtaacaatcaacattaaaataaaatgaaacaggctataaaatatcagattacagcacatataataagtactgcttgataaaatagttgtatacattcacacgtttatttgcattgtgggtgttagtggagttgaatttcttttttttctttttttgagaatagagtctccctctgtcacccaggctggagtgcaatggcatgatctcggctcactgtcacctccgcctcctgtgttcaagtgattctcctgcctcaacctcccaagtagctgggattacaggcacacaccaccacgcccggctaatttttgtatttttagtagagacggggtttcactgtgttagccaggatggtctcgaactcctgacctcaagtcatccacccgcctcggcttcccaaagtgctgggattacaggcgtgagccaccgcgcccggccggagttgaatttcttactgtggattgctggcaaagttgacaaaccactgctctaagatatctggtttctgctaacactaacgtcctgagcctttgttctgatacaacatttttaatataaccttagatcttccaagtttactgacttcccaggaacactccctagcctttctatcttcctaactaccactgcccactctgtatctggaatttgtgtttgagcatctaccgcataagatgaccccatacaagtgagaagaacaaccttagttagatttattttaggaaaatatttacacaaatacctcaggttacagacacacagcctggcatttacataagcatcacagtgccgtgtagtcagtattgttaatgacagcagctcgcatttattttgtgttaactgcatgccaagccttgcactaagcactttatagacatgtgctctttgaaacttcccacaccaccatggtgaataacagtattattgttattcctacccagcagaggagaaaaatcaaaacactggagtgctaaataatttgcacaatgattattaaaaatttaaggcagccacgcacggtggttcacacctgtaatcccagcactttgggaggccgaggtgggcggatcacgaggtcaggagatcgagaccatcctggctaacacagtgaaaccccgtttctactaaaaatataaaaaattagccagacgtggtagcgggcacctgtagtcccagctgctcgggaggctgaggcaggagaatggcgtgaacccaggaggcggagcttgcagtgagccgagattgcgccactgcactccagcctgggcgacagagcgagactccatctcaaaaaaaaaaaaaaaaaaaaatgtaaggcaaaaacaactgcttcacaaggagaggtctatgctctatttttgtactatggtttatgatatattttgagtgaaaattgcctcaagtagaactatgtagctgattgcaagttttgcaccaaatcttagatctctaaaataatttttacattcacaaatggagaaattttcaaatatttatatgaggatttttaccaagtattatgtaaaacagtaaaagccaaaagcaagctgggttacaattgtcgactgtgtaaataaattgtggcatctcatattataggataatgtgcaacaatctaggtgatccgaagagtatttgatgacattgcattaatgaccttaagttaataggtaagttataaagccatatgtatagaatacacccagttattcacacacacacttgttcattttccaaaatttcaacaattgacatacattattttattattattatcttttgagacagagtatcgctctgtcacccaggctagagtgcagtggtgcaatctcggctcactgcaacctctgcctcccaggttcaagcaattctcctgcctcagcctcctgagtagctgggattacaggcatgtaccaccatgtctggctaatttttgtatttttagtagagatggggtttcaccatgttggccaggctgggacatacattattttaagtgagatgatgcatgcaaaatgctcaactcagtacctagcctgcaataagtattcaatgaacattaactgttaatttttcatatacttcttggcgatttgtatgtttccttttgaaaaatgtctattcatgtcctttgcccactttttaatggtattattattattttaaaatattgctggcattcattattacaaagaacaacttagattctactgcatgatgctgtactgtggcacagttctaaagagccctatagtcatggatgcaaagttcctagcactactggtcctcagcacctcaggccattatcttatggcttcacagaatattcattccccaaatccatagtctttacctctggccttagcttttcagtagcaagcacaagcattcctggtgagagacagggctagctggatttcctaggccgactatgaatccctaagtctagctgggaaggtgactgcatccacctttaaacaggaggcttgcaactgagctcacacctgaccaatcagagagctcactaaatgctaattaggcaaaaacaggaggtaaagaaatagccaatcatctattgcctgatgaactcatctattgcctgatgagggacaaggatcgggatataaacccaggcattggagccagcaagggcaaccccctttgggtcccctccttgtatgggagctctgttttcactctatttcactctattaaatcttgcagctgcacccttctggttaccgctagaactgagctttcgctcgccgtccaccactgctgttttgctgccgtcgcagacccgccgctgacttccatccctccaatccagcagggcgcccgctgtgctcctgatccagggaagcacccgttgccactcctgatcgcgctaaaggcttgccattgttcctgcatggctaagtgcctggtttcgtcctaatcaagctgaacactagtcactgggttccacggttctcttccgtgacccacgacttctaatagagctataacactcaccgcacggcccaagattccattccttcgaatccgtgaggccaagaaccccaggtcagagaacacgaggcttgccaccatcttggaagtggcctgccgccattttggaagtggcccaccaccatcttgggagctctcggagcaaggacccctggtaacactggcagtacttatactttcattggttatacttatacttccccggttatatttatactttcctggcagtacgtatactttcatggtttatactattttaaaattattttttattaaatggagccaaattttttaaaagtcatcttttccactaaattgacatcaccatgttaaatctaaatttccctactaagtctttattttattttactttaagttctaggatacatgtgcagaacatgcaggtttgttacataggtatacatgtgccatggtggtttgctgcacccatcaacccgtcatctaggttttaagccctgcatgcattaggtatttgtcctaatactctcccattccttgccccccccacccccacccccaacaggccccagtgtgtgatgttcccctccctgtgttcatgtgttctcattgttcagctcctgtttatgagtgagaacatgtggtgtttagttttctgttcctgtgttagtttgctgagaaagatggcttccagcttcatccatgtccatggaaagaccacgatctcattcttttttatggctgcagggattatttgtttttgagttgtttgagttccttgtatatttctggatactagtccttagttagatgaatggtttgcaaatattttctcctattcagcaggaaacactgttgattgcttcccttgctgagtagaagctttttagtttaatatagtcctatttgtctatttttgttgttgttgttgcctgtgcttttgaggtcttagccataaaatctttgcctagaccaatgtcctaaaacattttccctatgttttcttctagtataaagttttattagttttttttttttttttttttttgagaggagggtttcactctgtcactcaggctagggtgtagtaggacgatcatagctcattgcagcattgaactcttgggctcaaggaatcttcctacctcagcatcccaagtaactgggactaccagtgcatgccaccatgcctattttttttttttttttgtagcgatgggatctcactgcattgtccagactggtcttgaattcctgggtcaagtgatcctccaggcttgggctcccaaagtgctaggattataggtgtggtcccatttaagtctttaatccatcttgagttgacttttgtgtatggtgagagacaggggcccagtttcattctttagcatgtggggatttatttctgggttccctattctgttccattggtttatgtgtctgtttttagcccatattatgttttggttactacagccttgttatatatatatgtatcaaggtgactgtgaaggtactatatggaaacattttttattgttgtaaaatatatgtacataaaatttaccattttagccattttgttttgtttttctcattgcagcctcctgggctcaagcaattctcccacctcagcctcctgagtagttgagactataggtataagccactacatccgactaatttttgtgtttttagaagagacagggttttgccatattgcctaggctggtctcaaacttctgggctcaagtaatctacctgcctcagcctcccaaagtgctgggattacaagcatgagccaccacgccaggctttgtttctccctacttttatttttttttaatttcttaaagctgtaccattggagaattttaactttttgtttgttggttggttttctttctcttattattgttattatttttttgcatctcagatgacacaaaccattgtttgtttcctgagacatggtttcactctgccaccgaggctgcagtgcagtggcatgatcctagctcactacactctcaaatctgagggctccagcaatcctcctaccctgctccccagcctccctagtaactaggactagaagcacaagccaccatgcctggctttttttttctttcttttctttcttttttttttaaaagagataggctctccctatgttcctcaggctggtctcaaactccgggccccaagcaatcctcccacctcagcttccttttagcccttttcaagtgtagggttctgtggcattaagtgcatttatacaaacattttgtaagttatccttttcatcattgcttccaaactgccaggcatctggatattaagactgtctccagccctttgaggttgagagaggaagcaagcacggaggaatggatttgacaacccacatgtccgtgactcaaagcaagcaaggccttgcacaaccaactcgccacccacacaatctgcacagtctcagtgagaaagcaggagcagggagctctccgctgagagtgaagaaatgtcctcaactcaacttctctgcagtgtgcatgtgtgtgaaacgcagacacacacgggaggaatttggctctgtcattttagtgtaccaaagaaaaaaaaacagggagaaatcacttgtttgaagccctaaatgacataaggaagattttcccagatctaaataatgatccctaaggtcaggtgctgtgtatggtatggatttggaaacttcataatgtctctgaccaccactccaggacactgcagacaggtgtgcatttactcagcatccagtaaacacctgcaaggtgcagagtactacactaggcacagggaacagagctactgactgactgccagagtttcgaagaatacagataagtcaactattaaagctaggaaacagaccggatgcggtggctcacgcctgtaatcccagcactttggaagaccgaggcgggtggatcaactgaggtcaagagttcaagaccagcctgccaacatggtgaaactccgtccctattaataatacaaaaaaattagctgggcatggtggcacatgcctgtaatcccagctattcgggaggctgaggcaggagaattgcttgaacccaggaggctgcagtgagctgagatcgcgccattgcactccagcctgggcaacaagagcgaaactctgcctccaataaataaataaataaaataaaataaaataaagccataaaacagtaaagccagtcgtttttgcctcaaatactcctccaattcatcacctcctctctatctccatggccaccatcatctctccctggaaatgctgcgagatccctctaactagactttccacaattaacttccacatgaccaccaaaggcatgccattctcctgcttacacccttcctgggtgttatggattgaattatggcccccgaagtcatatgttgaagccataacacccctcaatgtgactacatggagagaggtcctttaaggaggtagttaaggttaaataaggtcatcagatggggccctaatccaataggacttgtgtattttatttttattattttttagactcagtttcgctctgttgcccaggctagagtgcagtggcatgatctcagctcactgcaacctccacctccctggttcaagcgattctcctgcctcagcctctcaagtagctgggattacaggtgcccgccatgacactcagctaatttttttgtattttcagtagagacagggtttctccttgttggtcaggctggtctcgaacttctgacctcaggtgatccgctcaccttggcctcccaaagtgctaggattacaggcatgagccaccatgcctggccaatttcttattcgttaggtctcaacttcagtgtcctcttccactcatggtattgagcaggattctgccctcctcttcctgctaccactggcccccttgagcacctacatttctgtttccttcctaacacttatcatgatttgtaaacatgcatttgctttcatttatctgcctttcccaccagaccataaactctacaagaacagattggtctgtgaatactcagtgcctactacacagttgacactgaaagatctggggaaagagcaaatcaactttcaataaagtcttcaagggctcagagagttgtcttacaccaaagttctttaccacctttacacaggtcacacctaccacatggtaacagattcacaaagtcattggactagggatgaaagattgagggcaatgatgggagaaaacagcaacagttaaggtcagaagtcatacaagatgaaactttttaggagtctgagtcatttgaggccatccaaaaaccattgtccaagattttaccatgtacgcaaaaccaaaccagccctctagtagggtactgaagatatcaaaggtgaggaccaatctttcttgtccatcactagcacctaccagagtctggcatataggaggctcgtttgtttctgtacttaggaggcttatagtctagacaagaattggcaaattgcagcccatgggccaaattcggcccactacctatttttttagataaagttttattagaatgcacccttactcattactgacataccggctatggtagttttgttttttgttttgtttgtttgtttgttttgagatggagttttgctcttgttgcccagactggagttcaatggcgcgatctcagctcactgcaaccttcgtctcctgggttaaagcaattatcctgtctcagcctcctaagatgctgagattacaggtgtaagccaccacgcctggtccttcatcatttttttttaatggcttttaaagttcacaagaagaaagactatttccgaaatctgtttttcctcattttgtttattattattattaaagacaatgctgtaaaatatttaacatatcgtaatatataataagtatgaattatatttctatatgttctatgctatacgtgtttcttattatatgttccatactaaatataaattactactctaagatggcccccagtgatcccaccttttggtgttcacatctttaatttcctgtgagtgtggcatacacatgaggtggtttgcttcttttttcttcctttttttttttttttttggttgttgattcaagttcttgctctgtcacctaggctggagtacactggggtgatcaagctcactgcagcctcaatctcccaggctcaagtgatcctcctgcctcagcctcctaagtagctgagactaaaggtgtgcaccatcacacccagctaatttttttggtttttagtagagatgaggtcttgctagtttgctcaggatgctcttgaactcctgaggtcaagcaatcctccctccttggcctcacaaaatactgggattacaggcatgagctaccgtatccagccccttttccttctttcttcttcttcattttcttttttttaaaataagcctgagttcctgaaccttgctgctttattttttgagatggagtcttgctctgttgcccaggctggagtacagtggcgcgatcttggctcactgcaacctccacttccctggttcaagcaattctcctgcctcagcctcccaagtcacggggattacaggcgtgcaccaccatgccaggctaattttttgtatttttagtagagacagggtttcaccatgctggccaggctggtcttgaacttctgatcttgggatccacccaccttggcctccccaagtgctgggattacaggcatgagccactgtgcccagcttgaaccttgcttctaaccaatagaatatggcgcaggtaatgggatgtcacttccatgattaggttataaaaaaccatgacttcttgttgccagccaactctttccccttccttgctttggtgaagcagctgccctatggagaggctcacatggcaagatgtgaagttagcattgaccaacagccagcagggactggagccctcagtccaatagtccttaaggaatgcagtgaattttgcaatcactacatgaacttgaaagcagatccttcctcagtcctgccttcagatgagacatcagctgggctggcaccttaattgtagccttgtgagaaatcctaatacggagaacccagttaagctgtgctcagacacttgattcatggaaactgtgagataataaatgcgtgttggtttaagctgttaagttttggagtagcttgttacacagcaatcgacaaccaatacacataccattagtcacaagcagtaattctagggtcaggcactcaatgtagccactattatttccaagttattccaaagagcccccatctaaaaggtagcagaaatcttctctattttcctagttagtccagacacatgccacaccctgtttggagtctgcccagtattcttttatttacttatttgagacagagtctcactctgtcacccaggctggagtccagtggtgtgatctcagctcactgcaacctctgcctcccaggttcaaatgattctcctgcctcagcctttccagtagctgggactacaagtgcatgccaccacacctggctaatttttgtatttttagtagagacagggttttaccttgttggccaggctggtcttgaactcctaacctcaagtgatccacccacctcggcctcccaaagtgctgggattataggcatgagccaccacgcctggccaatgctcagtattcttgaaagtaaaatgacaaacttgatgacagttgtaattagataaagaatctcatgaagcaatagtaataaaatgtatctaagatctgcattaaatttaaactttatactgttatagaaacagcgtaattacagttcccagcaggaacaggattacattttttatttcctcccaaggcaggacctaaaaaatctagaagcctgggataaataacataaaactaaggtatcaacagtatcactgtggtggggacaattcagccaggatctttacatatgatagaaaaggcttctctgagtccacagcttcaccccctattcctcagaaaatccgccccagagccctttctcacaaaggaagattggctgcctgggtgtggtggctcacacctgtaatcccagcactttgggaagctgaggcaggaggatcatttgaggccaggagttcaagacgagtctgggcaatatggcaagaccccatctctacaaataataatttaaagaattagctgggcacctgtagtcccagctacttgggaggctgaggcagaaggatcgcttgagcccaggagctcaaggctacagtgagttaggatcttgccacttaacttcaggctaggtgacagagcaagaccccatctctataaaaaaaaaaaaaacaaaacagactggttcttgtttcattctgtacaacttcaatgcggtcattagaaaaggtacaggggaaatctcaaaaccttgacatttcagagatgagcagctttttcattcccctggctaaggttcaaaggatttcttagtccagcattgccatgggctcacagcatttcctagtaatattatatttcttcttatccataaaaggcagccccttccaggacaaaggatttttcatacagattgtctcatgcaattgtcatggaattatgctgaggcatgtcgccaggcaatgtcattaccttcttactaatgaaaaaactgaggtggtttcaaagcttgcccagggtgatttagctcctagctattcaggccctttccacacatatcccagctctgtgctctctgtggtacagtgaacgcatcgtagattcagattggaattcaagctctgcccaggaagcatcagagcctgctctccactcccaacatcacctacttccctcccttccccacacctactaacaacatcattagtcacaagaaaaccctaagcaaaggaagaatttgacaagcaaaaaatatcaaactttgaggtctacaggcagatctatcctacaccagtgaattctaaaatgtaaaatgcttcccaatgtatgccgctgaagagtgaagtgagagcaatcattatttcctagacggtttttgagctgggcaacctgggagtcacagaggtgagcaagaacttggggtgggtgggagagagatattaaggaactaaaaaaacctcagaggcaggaaaatgcaatggaaaggcccagcaccggcgcaggtgggagatctgggggaaagagcagagctggggaaaggtagttttggagtcacctccaaaagtaaggcagctcatgcagccttgagaaggctttattccagggagttagagggcccatggaaggtgtctgcaaaggaaagaaatctgatctgcacagcactcatctgacagggggaagggtgactgggaaggtgagagcctgggagggagactgttcaaaagtcaccctggaaacagcatctccttgtcacagtttcttcacctggaacaccaagtggttctaccttattacctccaccatcacactcagcaacaacactcagtgcatgaatctagccacagcaagaagaaatacaggcctgggccgaacgcggtggctcacacctgtaatcctaacattttgagaggccaaggtgggctgactgcctgaggtccggagtttgagaccagcctggccaagacagtgaaaccccatctctactaaaaatacaaaaattagccaggcatggtggtgtgtgcctgtagtcccagctacttgggaggctgaggcaggagaatcgcttgaacccgggaggtagaggttgcagtgagccaagatggcaccactccagcctgggtgacagagtgagactgtctcaaaaaaaaaaaaaaaaaagaaagaaatacaggcctgaactagggtggtggcagccagaaaaatgtgcttaaaatgaaggcagggtggggctgccattcttttgtctagaaaatgaaggaaaaaaaaagtaaataaaagactggggctggttcccataggataagaatgctgtcatttccccagatgtttattttggagactcggcctcaatccacaatgtacttttatagtaaataatgaaagttaccaggagaaaaccctggttatttttacgttcaagcgtcatccttagttgttagggacaatggcctcatttttaccccattactattgactctataattaggctttaaagttatattcatgtttaaataatacaaagtcataggagctttataattgacagctacctggaagcaaacccttcagggtaaaataagtctgtcaagctgaattaattttaatgttagaagagtcaccaagctattaatacaaagactgcactcccgaaagacatacaaaacatcatagctttctggaacaaaatataaactttgaaacttttgatctacagagagacaacttatattccccatccagactcactaggaatggcttatttgaatgaaaaggcagtagaagaggcagataagtaaatagaaataataaacacataaaatgatacaataaaagattactcttactagcaatcaaagaatgacaagttgatgaaaacatagacaccattttatgcctattcagttgacactattcaatgttttcaatgtcagcagtggagatgaatgaatcctcacccaccttgctgctggccttgaaattagtatatgtattactgatggccacgctttatgtacccaaaacactaaagatatatttgaagcaatcacctcatttacagagccttttccaacaggaatacttcaatgaaaggactcttactgaaacaaatttttttttttttgagacagtgtcttgctctgtcacccaggctgtagtgcagtggggagatctcggctcactgcaacctccgcctcccgggctcaagcaattctcctgcctcagcttcccaagtagctgggattataggcatgcaccaccatgctcgagtaatttttgtatttatagtaaagacagggtttcaccatgttggcaaggctggtcttgaactcctgacctcaggcgatctgcctgcctcagcctcccaaagtgctgggattacaagagtgagccactgcacctggccacaaaatttttgattggcgtcattagttataaaaagcaggaatggaaaccacatgagtgtccaacaagatctcatggttttacaattttttttttttttttctgacgcagggccttgcactgtcatccaggctggagttaagtggcatgatcatgactcactgcagcctcaacctcctgggcttcagtgatcctcccacctcagcctcccaagtagctgggaccacaggcaaatgacaccacaactggctaatattttgagaaaatttttgtaaagacgaggtttcactacattgcccaggctgatcccaaactcctggcctcaagcaatcctcccacctcaacctcccaaggtgttgggatgatatgcatgagccaccacgcctgacctaaacatttttatgttttagtatagctattaaaaataacagctatttttaataacactatcagatgaaacgtaggaaatgttttacagtattaaccgtgggggtgaggcagaaatcagaattgtgttctataactgcagctttgtaaataatatgattgtttttagaactaacatttgcactgaaagatacataattctctgtgtgtttttccttccaaaataatctgcaattaataatagctatccactccctatatccaaacactgctgagcaattgctcatatactgggtacatttcatgcaatttttacagcacacacaaaaggaagggcttatcctcattttgtgggcttgaagaggttaggtggcatacttctccagggtcacatattgaggtttcaaccaggtctgtttgtccccaaatctcttacgatttgtcctggtgctgttcaaagggggagaaaagttggatcaggccattaggattatgcccactgatgcttacttttttttttttttttttttttttgagacagagtctcactctgtctcccaggctggagtgcagtggtgtgatctctgctcactacaacctccgcctccctggttcaggcaattctctcctgcctcagcctcctgagtagctggaattacaggtctatgtcaccaagcccagctaatttttgtatttttagtagagacagggttttaccatattggccagcctggtctcaaactcctgacctcaagtgttgcacctgccttgacctcccaaagtgctaggattgtaggtgtgagccaccactgtgcccagccactgatactttcttaatatcattctgtctctttgcaaatgattacaaaaacaaaaatggtagcatggaagtgggttcatggaatccactgtgcatggtgcatggaagtgagctcagaagggatggtttgcatgtcaaggcagaagagttgaaacttgccacattttgtcccttgtattatacctttctggtgtgttagtaaacagaagattccatctccctcctaaggatggtgagctgcatgaaatgtagtctgggtccaccatttcctccaagagcccttgctgatcctcagcaaagatccccaaccattacttagcactaaggacaatggaccttgagtgccttggagaggggccagagacaaagatagcttgaaaagtcagtggcccaggccgggcgtggtggctcatacctgtaatcccagcactttgggaagccgaggtgggtggatcacctaaggtcaggagttcaagaccagcctggccaacatggtgaaaccccatctctactaaaaatacaaaaattagccaggcgtggtggcaggcacctgcaatcccagctacttgggaggctaaggcaggagaattgcttgaacccgggaggtggaggttgcagtgagctgagaccccaccactgcactccagtctgggtgacaagagcaaaactctatctcaaaaaaaaaaaaaaaagagaaagaaagaaaagtcagtggctctccttagtgatctgtatccaaagctgtggcttcagctgcaaatacaaacagatgctcttaaaattcccacatggctccttttcatttgtaaatctgtctcaaatttccaaatatttatatgtaaacatgttccaaagcttaaacagacactaaggtgattggcacattaagtatgattagggcacttacttggtatcttttctagatactatcatggtttcctgaacatctaagactggtcgacagagccttacctctcattccatctgaaggttaacacctttacaaattctgggtctgagatatttaatcactgtctcttatgctgtatttcaagtcagcttagagtactcaacttagattacaaactcttccaaggcagcagagttcatatcctaagttttggaccaagattctactgcaaacatatggttaatattttataggtcccttggaaatacttgcatttggcttgaaatatctacagagcttcctaccaacagtcagcaattctatctgttctggctttcagagtttgaacaggtcaaatataaggagtgtgtccaagcttctcctacaaatctgatcagtttaagcacccatggtaagacttctgatgtaaggcttctgaaactccccatgttttcctaggatgatggtggcgtgcgtttacagagagctaactatgtgttctatgcatcaggctctccactatgtattcgcattagcttactttgtttgaggatcaaattattatccccattctacaaataaagaaactgtaactgagaggttaagttctttgcccaaggacatataaggggtaaccagaataaaatcccttggagacatgctgccacaagccaaggaacttccagaaactaggagagaatcctgaaacagatccttccccagcaccctcacagggaagatggccgtgcaaaaccttgatcttgaacttctggcttccagatttgtgagacaataagcttctgttctttaagctgctctgtgtgtggtaccttgttacagcagccccagctaactaatatatggcttgaatgtgtagctttaacatcggagagggcctttcaaattccttaattccaacaaacagaggactccacagtcaggtactgcaaatttgttacttaatgtctttaaattctgaatccacctttgccaagactatgtgcacaaaaggaaaaactgtggttaccttttgtaacaagttatataaataagaactaaatgaccatgttttcttttctctcttctaattacccaaaggttaacatgctattttaaagtttaatttaatttaattttgcagcttacccaggtttaacagttatttgcagagaataatcagaaggaactgcaactggtgtttaatgcaaataaggccaggctgctgaactagggatgactcatgcaggccttgtgcaaacatctagtctgatttgcatttaagagaaaaggtacacctatagaagtatccaacatgtattaaaacatcttcaaaatgttttggagttttaaagaagtgcccattaaagatgctttctgctccacctcttaaaaaaagcatggccccaggaaaaatgataatgtattctagaacttttttctgctgtgatattttctcctcccaatcaatgtttgcttcccctttaaaatctctgtgtactttcatgggtgcagtagcacatggtgatgagggcttgggtttgattgagcaatgctcaccccatctccagcccctaccccacaaaggcaagtagtacagagaatatatatacttatgattctgacataaaataaaatgtaaagccaatcaaaatgtttgcatattttttgcttttccacattccccttctccatagacctagacttcaatcaacctgcatctcctataaagagaaaatgactctcttgaatgcaactggactccaatgaaaacaatcctctttaactctcttgttatcataatactatttataacttttactcaattaatgttattataagctcttatatattcaacatgttaccaacctgaaaacttacccccgaattaacctgatttaggtgaagacaccctatagaactctgagttgagtcaggaagattgatccattatttaggaaacagagctcactgtcattgtcccctgtaggtctagggaggaagcaggctctggctgaattgtctagaggattctctcccttccagcaaccaatctccttcccaccccatctccactcttgtgagcaaaccttcagctgtccatcaataaatcatgccagggataaattcccaacaatagcaaatctaactggcctcaacttgctattttaacactttgatcctaacttccgagagctctttttaaaaagaaaggaaaaaaatggaattagtgtaagaatagagagaagagcattaaggataaactaggggtttagtgccgggtgcagtggctcacacctgtaatcccagcactttgggaggccaagtttggtggatcacttgaggtcaggaatttgagaccagcctggccaacatcatgaatccccgtctctaccaagaatatgaaaattatccaggcatggtggcgtgagcctgtaatcccagctactcagaaggctgaagtacaaaaatcgcttgaacctgggaggtggaggttgcagtgagccgagactgtgccactgcactttagcctgggcaacagagtgagattccatctcaaaaaaagaaaaagaataaactaggggtttaaatagtccctaaatcagcaatcagaaataaatcaagagtacctgcacactgcacaactcaaagaaaattactgaaaagcctttaaatgtcacatggatttgaactttactattagatatctggagctaattaaaatattttcaaagcatgttttaaaagtgctctgaatagactgtgctctggatttacatgatgccatcctttcaaatatttcggagttgtgacataggctcttctacaatattcatcaatgaaaaactgagctacactcaagagcaaaagctggtgtttgggccacaaaacggtcacctccaagtgctccgcagctaggcctgccttatatatcagttcctaggctcattctggctattgccctacccatcctcagagtccaacctactcttttcctccttcatcttaacagacgtgtctacagtgaatttgtgtcttagttttccaaagcttaaacctcaggtacagaaaacaatgttgcactaaccatgacagctaactttgtgcatgtttgcatgtgtcacatgagtatttaaatattatcaatgtttggctgggcacggtggctcatgcctgtaatctgaacactttgggaggccaaggcgggtggatcgcttgagaccaggacttcgagaccagcctggccaacatggtgaaactctgtctctagtaaaaatacagaaaattagccgggcgtggtggcgcacacctgctataatcccagccacttgggattccgaggcacaagaattgcttgagcccaggaggcagaggttgcagtgaggagagactgtgccactggaccccagcctgggtaacagagcaagactatctcaaaaaataaaatagaataagaaaataaatcttatcaatgcttgttatggcttaaacattagtaatttaggctatcaataaggaatgttgggctaggcttgtggctcacacctgtaacccagtactttgggaggctgaggcaggaggatcacatgagctcaggagaccaggctgggcagtatggtgaaaccacagctgtacaaaatatatatatatatactaaatttagcagggcatggtggtgtagctgtagtcccagttacttgggcagctgagggaggagtatcacttgatcctgagaggcagaggttgcagtaagccaagatgctgtcttgaaaaaaaaaaaaagggaatttattttgctgtctggaccaaacacaaaatacaattacactcaccatactctgaaatcagaatcaatgactctcaagaaacagcttccataggtcaaatggggatctacaaggcttccagattatcttcaaaatctgttgatagacatttctgttgtgcttcattatagaaattactagattttcacatatgcgttagaacttggagaggctctatctgctctgactgtgcccattgcaggccccaccctagctccagccaccttctgctccctcacaagtacactcacaagggcagctaggcagcttcattccttttccaggtcctcaaatcccgatgtaatgtctttatcatttgtactttaacaacttactgcctgaaccattctttgcattatggcttgtattgtggttgtttttgtttctaacagagtaaaaatccaaaggtgcaggcaaggcatggtggctcatgcctataatcccagcactttggagggccgaggtgggcagattgcttgagctcaggagttcaagaccagcctgggcaacatggcgaaaccctatctctacaaaaaaatacaaaaattagctgggaattatggtgcgtgcctgtggtcccagctacttgagaggctgaggtgggaggatcgtttgagcccaggaagcagaggttgcagtgagccatgactgcaccacggcactccagcctgggcaatagagtgagaccctgtctcaaataataataataataatgataataataataataataaatgataatctaaaggtgcaagatcatggcctattcctcttatttctcaagtggggcagaatcaagaaatggttaagggctcctgtctgaggttagacagataggggatgaaatcccagctctaaggcctgctacctgcagaagcttgggaaaaatattcttagtaagctcctacttctccatttataacatgaagataatggttaccttacagggtccttgtgaagcttaatcttgatcccatgtaaagcccttagtagcatgcacagtatgtggccccagatatccactgagtgaggcattccagtgattcatttcatcagaaattcagtaacacacacagatataattcttatatttcccccttcgataaagcttagtttagtttattattaaccatcgtaaacctgaaacatcagggaactgaagttttcaagtgaaaaacagagtaggaaaacaataaaaacttttataattgcacttcacagcttgcaaaagcttttcagataccattaacatacttatctctaaaacatcattgaaaagtagattattttcattttattctctgcaatagctccattgcccagaacagcatgtaacacacagtagaactttcataaagaactaccaaatgtagaatcaagctcagagttcaaggctgtatccaggttctcagaaatgacaagatgtagaggaaccagaaccagatcttagcatttgaatccaaatcctgcatcctttctcctcaatcacactgtctccggcccccagggtaaggttccacagaactgtaattatttaagacattctatattttctagatgacaataacttcaagataagagagtagagtgcttaaaaaaccccgattaaagaaaaaaaagatctctcttgtgtcaacaagggaagagagaaccagtaatataactacttggatacagatttttgctttcctcaaagtatactcagcaaaccaccttgatcatggtatgaacaagtgaaacaaaccacatttcaaaaccaggttgaatgaaaagatgcattggctgagcttacttggaaataatatggaaagagaggaagtggacagatctatagataaaaacaacattggccttggccatgaacaagggggttcattttactatttctacatgtgtttgaaatctttctaaattaaaacaaggcaacaacaacacaacaaaaactctccttcacataaaccaatgtattaacatgaggtcaccactgtgtaaagcacatgtgtactaatcaccaacacaggctctgaagggaacacatgctttatgcagccattggctccatcttgaaaactcagatattaaataatcttttcatagacagttaagaggagattattttaaaaaatgaaatacaggccgggcacagtggctcacgcctgtaatcccagcgctttgggaggctgaggcgggcagatcacctaaggtcaggagttcatgaccagcctggtcaacatggtgaaaccccatctctactaaaaatacaaaaattagctgggcttggtggtgcacttctgtagtcccagctacttgggaggctgaggcaggagaattgcttgaacctgggaggcggaggttgcagtgagctgagatcatgccactacataccaccctgggctacagacagaacaagactctgtctcaaaaaaaaaaaaaaaaagaaagaaagaaaagaaaaaaaaaaagatacatctgaatatttaataaagtgaaaatgttatagaaaactataatgttttatgagtcagggccactccatttgcattggacttgaggaggcatatttcttctttggttaaacaggaatatttagcatttacttgttctttttgtgcattacaatttttttcttttaagaatcagtttcagcctggcacaggggctcatgcctgtaatcctagcactttgggagcctgaggcaggtggatcatttgaagtcaagagttcgagaccagtctggtcaacgtggtaaaaccccgtctctactaaaaatacaaaacttagccaggcatggtggcacatgcctgtaatcccagctactcaggaggctgaggcaggagaattgcttgaacctgggaggcggaggttgcagtatgccaagatcacaccactgcactccagcttgggtgacagagtgagactctgtctaacaaaaaaatatatatatatatatattatgaagtaatattgctgttcctcagtttatcatctgtaaaatgagtaaaaacaatagcagctgccttttacagctgctgtgaggataaaatgattcaatatatggaaagctctggaatagggcttgacccaaaggaaggctcagtaaatattagctgttgtttttcttatgtgagataattaaatactaggagaagaaacacatcaccaaattgacacttcagggacagctgagaagttactacagcccacgccggggctcaaatttactttcgtgtgttgaatcattaatagcaagggaaatacctaactcgtaacctactgtctcaggccacaggaaaatgtcaccctagtagtgagagagatattaaatattttactctaccagctgctcagagcaaagcagcctggggtgtatccattactgcctttttcagatctcctgaaagatgtcacaaaccccaaactctggaatttagaatataatatgaacaaggcaacttagagttggtatctttgcatagtgagtaaatgtggaatttttcagaatgataaagtggttttgtttatggtgtttgtttttttaagaaatagaaattgtctttacatctgacacctctgccacaatatccagtgtatatcttgccaataagagacacattacaccagccagcctaaaatagtctcaggttgtttaccaacaatgtgtaattgtgcattggagaacccggggctgaaagtattcatatattcatgttacactcccatcagatttgccttattaaatggttctaatgctagcatcctacataaatggcaaaattcatgcattatataataacatcaacatttgggaagggaaagattataacagacactgaatctcttaattttttctctaccaagataaaaaaaaaaaatcctggacatgtgcttgcttcggcagcacatatactaaaattggaatgatatagagaagattagcatggcctttgcacaaggatgacacacaaattcatgaagcattccatttgtaaaaattaaaaaaaaaattaaaagccttgataaaatgtcctgcggatttgacagtttcacattgacgcttaatcaagttaattcttgattatttgtgtgtttactgactgatgtagttattatccatgaatcccaggctctggtcagctgcctggcttcacataagtttacacaggcaaactcccaaagggagcttttaacttttaactgtttaaaaagcggttagaggtgatcaatattctaattgtttccaggccttgaaaacagagaatcctatattctctcctgttctctacagagtcacagcagtgcaattccaattcaatccaatccccagccataacataattaacggcgcagcactgccagggacagacagatgaagagggcttgcacgcgcccagacaccaggctcactgctgaaccatttgagcttaagttacatatagttcattatccccctttacccctaaatacttcaggggtagtctctcacattctcttacataaccatagtagaattatcaacttcagacaatttaacattaacattcacagttatctaatagtctgatttcgtcattgacccaatgatgtcagttatagtattatttttcctctagcacaggatccagtctagaatcaggtgttactttaggtagccatgtcctttaatctgaaacatttccacaacatatatatatatatatatacacacacacacacacacacacacacatatatacacacacacatatatatatatgaaatatttacacaacatatatatgtgtgtgtgtatgtatatatatatatatttgagactgagtttatctctgtcacccaggctggagtgcagtggcatggtcttggcttactgcaacctccgcctcccgggttcaagcgattcttgtgcttcagcctcccaagtagctgggattacaggcgcctgccaccatgcccagctaatttttatatttttagtagagacacggttttaccatgttggccaggctggtctcgaactcctgacctcaggtgatctgcccaccttggcctcccaaagtgagattacaggcgtgagccactgtgcccggcctccacaacctgtatttgtcatttacaacactgacattaaaagaatatggtattccttctctctctctctctctctttttaaaactgaacctcccacttttgggctttctctgtcatttcctcgtgatttaattcaaggtctctgttcttgctggaacatcacataggtgatgctgcgtcctttcagatgtgacatctggaggcacgtgaggtctctgccccttgtcggtgattgcattttgattttatactttggtcatgtggtcaacgtgttgtttgatttctccactgtatgtattttttgaacttgtaatttgtggggagacacttttaagacatcgcaaatgtcccgttccttatcacaatttcctcctaaacgtgacactcatggatgattctcccctgatccagtctctactacaatggccatgaaaggatgatttcacagcacccatcccctccacgcatattggtgagcctgagcatgccgctgtaagcatagcctccctactttccacttattagttagtaatcaatatggatgtgtaaattcctattttttctccaatggcatataattccttactgtccataattattttggtgtccacatggtccctggtttggccaatcaaagcactttcaagctagcactgtgtccttgtgacaggctcccatcattctttcagcatgtccataccttgtgacaataacaagatgttccaggctcaagttgtacctctcctgccccagcctgtaatcagccatttctcccagtacccctggttcctttgaatgggaaatgataatagagaccaagatcttggcacttgatgtgcttgttactagcggggtgactttgcttcttggtcctggtcctttgatggatagagctaagtaaaaaatgtatacacacacacacatacatatacacttatgcacacacgcatgtacatgggaatacttatacatgcatgtatttcagaaatcagttcatacctattcttctgattccaattgattcccacaatgttcttttcccccatctcccatttcctttctatatgttccttctttctcagtgagaaccctggctctccaaaacaataactcatttgctcaatgctaaaatacatctaaaactgtttcagagttgctttgccagtatcactacataaagtatatcgtaagagtttaaaatttctttgcgagtttccctcaccacccaactttagacaagatggagcatatctcatagaatactgtgttcgtagctccctggattatttctttttctcccctcttcactgtggttatggaattcatttgaaatacaactgggtttcttcatttcatgttgctctcagttttaggatttcccctatccctattatatatatacttatatttaaatataacttaaaaaaatagggatgggggtctcaccgtgtagctcagactggtcttaggcgggaggatcatttggtcctcagctcaaacgatcctcccacctcagtctcccgaagtgctgagattataagcatgagccaccaagtctggccccatccttgatttaaatttatttttgaatatgtaggacattaacaggctccccaaagccaaaactatgcaaaagggtgtcttagacaagtaaccctcctcacatatccccttctccttgttcccacccaccctttgttggtaatcgactttactgttttctgtttatccgtcctgtgtgttttacaaagataagaagataggccaggcgcggtgcctcacgcctgtaatcctagcactttgggaggctgaggcgggtggatcacctgaggtcaggagttcgagaccagcctgaccaacatggagaaaccccgtctctactaaaaaaaaaaaaatacaaaattagccaggcacagtggtgcatgcctgtaatcccagctacttgggaggctgaggcaggagaattgcttgaactcgggaggcagaggttgtggtgagccaagatcgtgctattgcactccagcctgggcaacaagagcaaaactctgtctcaaaaaaaaaaaaaaaaaaaaagatagttgtatttttccttatgtttccttttttcttttacaaaagtagaaaatatatgttcttttgcacttagcttttttcacttagcaatatctcctataatcactagaagtcacttctcaggcaactgtttgcaagtagagaaatatttatgtcttatgtctatgtataaatcattttcctggaaaacttaaaagaaatccataggccgggcatggtagctcacgcctgtaatcccagcactttgggaggttgaggcgggaggatcacaaggtcaagagatcaagactatcctggccaacatggtgaaaccccatctctactaaaaatacaaaaattatccgggcgtggtggcacgcccctgtagtcccagctacttgggaggctgaggcaggagaatcgcttgaacccgggaggtggaggttgcaatgagctgagattgtgccactgcactccagcctgggcgacagaacgagattccatctcaaaaaaaaaaaaaaaaaaaaaaaaaaagaaatccatagatcccacgatggcttgcttccctttctttctctgttttccaagacagaagtcctcatctaccaccctaggtccttaaagtctagctttcctttaaagactcaactttaacctaagggtagcatattactgcagtgaatttatcaacctctaggcgagatatttacaactccagggaccttccctaagcaaaatttcaatctaaggtgatagctccaatagcagcaaccaagtaaatattcattgagaatttttaaaaaatcaccttgtgaacctttaatccctaacagataatctggtaactcatggcaagtggtcatcaaagaaaccaggaagggccgggcacggtggctcacgcctgtaatcccagcacttcgggaggctgaggcgggcggatcacgaggtcaggagatggagatcatcctggctaacacaatgaaaccccatctctactaaaaataaaaaaaaaagaattagccgggcttggtggcgggcgcctgtagtcccagctactctactcgggaggctgaggcaggagaacggcatgaacccgggaggcggagctttcggtgagcaaaaattgcgccactgcactccagcctgggagacagagcgagactccgtctcgggaaagaaaaaaaaaaaaaaaggtatttggatgactcagaataggccaccatcgctgttgggaaactcctagtcctgccctgtgcaaaccaactgcagcttaattgtctctgactggcaattgctaccaccctcctaccattcccatcatgtaggagagctgctaggaggtccactcactttgtcactagcacccaaattcaaaggcactagaaagaagctatcactccaaaccctctacataccagcaagaaggaggttggtgctgcagtacctggatattccaaattggccaatctctcccaatctctccaatatacaaagatcggggggaaaaaatgactaaaaattatcctcccacatagtgattttaattcccggtagaaatgtaagtggaaggaagccaaagatgaattcagtacaataatatcatgattaacaaagtcttgggatgaacatttcatcaacacaatcactctgggataatgcctgggtggatgagatacttgagtagcttctgcttctacatgtcctagaaccagcagagggaaagggcctgtccctaagacccctccagctgggaacagagcctgcagccccagagatgcctgaggaaccccctctgtggccagcctatctccaccttcgtctttgctcttccaccttccccaaactgaacatggtttgttttaagggaaagagcagctagtggcttccacaagatccagcccaaaagtaatgcacattctggcacttaacccgaatctcctgcaacctcttctcatcttcatgaagcttctgacaaggaaatgtggctatactatatcctcctctttgttcaccaaggtaataaggaagatactttttatttttttatttaagatggagttggccgggcgcagtggctcacgcccataatcccagcaccttgggaggccgaggtgggtggatcatgaggtcaggagctggagaccagcctgactaccatggtgaaaccccgtctctactaaaaatacaaaaattagccaggcatgatggcgcgcacctgtagtcccagctactccagaggctgaggcaggagaatcgcttgaacccaggaggcagaggttgcagtgagccgagatcgcaccaccgccctccagcctgggcaacagagcgagactctgtctcaaataaaataaaataaaataaaataacataaaataacataaaataaaataaataaaataaaataacataaaataacataaaataaaataaataaaataaaataaaataaaaaataaaataaaatataaaataaaataaaataaaataaaataaaataaaataaagaagccctgaactcatagcctcaagcaatccttccaccttggcctcccaaagtgctgggattataggcgtgagccattgcacccagactgtgttgttgttgctatcagggcaactgtgatatttatcttaagaaagttttagattcaaatgcagtggcctctctgaagattcttgagataagacaaagagtgggagagaactattctctactctagcatggcaccacgagcagtacggccttagcaagtcacatcctcacctgggctcaggttatcatctgtcagtgagggttcttgaccagatcaatgattctaagatgtggccacacatcagaatcccacagtgtgcttttaacagcaatagtttgttgaacctgaacccaatctactgaacctggaatggggaacaggtaaagtctgtccctgcatttctccagaagatggctgaggtcctttctggcactaaatctcctaattctataggtttttttcttttcctatttttttttttaatggactaggccaggtacagtggctcacgtctgtaatcccagcactttgggaggctgaggcgggcggatcacaaggtcaaaagattgagacctttctggccaacatggtgaaaccccatctctaaaaatacaaaaattagctgggcatggtggtacacacctgtagtccaagctgctcgggaggctgaggcaggaaaatcacttgaacctgggaggtggaggttgcagtgagccgagattgcgccactgcactccagcctggtgacagagcaagactgttaaaaaaaaaaaaaaaaaaaaaaaggattattactgaatagttttaggtttacggaaaaatggagtggcaatccccacatatcctttcagccccgtgccttagtgtacgctgttcacatcttgcattagagtggcacatttgttacaactgatgagccaataatgagatacacacacacacacatatatatatatatattttttttttcttttgagacagggtctcactctgttacccaggctgtagtgcagtaatgtgatctcggctcactgcaacccccatttcccaggttcaagcgattctcctgcctcagcctcctgagtaactgggactacaggtgcccgccaacacgcctggctaatttttgtattttcagtagagacagggtttcaccatgttggccaggctggtcttgaactcctgacctcaagtgatctgcccgcgtcagccccccgaagtgctgagattacaggtgtgagccaatgtgcccggccccagtaatgacatattgtaactaaagtccctagtttacatgaagtccacagttcactagggttcactctttgttgtgtggggtttggcaaatgtatagtgacacacatggtacctagttgaaagaatgccctcttgcattaagtcttactctcaagagtggaacacacagtaaaggcagaagaggagagcaataggctgcttatatcccgtgatcctcaagtgatgacaaatcgaagatatttacagtgaacagtggtgcatgtgcccagcaccataaacatgaacctacttacttttttgctttttcattgttcctttttaacacttggaatatctttcctacagcaatactctctgttacttaaactaccaaacccattatctcctgatgaagcaatgtgcttcccaaacgtagtaattcaaggctgtgtctttacagccttgaacaatcttttaaaaatctgagacatagcaaccagatgttgatagagattacttctcttgatccaaagataactggcacttggagttctaagaaagtcaggagttcaaagaatgagaatctaagtgagggaaaatgaactccttgaacacacgttttttgcactgttatcaagtcatttcttaggattgattgtcagaatgaaatggttgttaaaaaattgtactctaggccgggcgcggtggctcatgcctgtaatcccagcactttgggaagccgaagcgggcagatcacctgaggtcaaggttcgagaccagcctgaccaacatggagaggccctgtctctactaaaaatacaaaatcagccgggcttggtggcacgtgcctataatcccagctactagggaggctaaggcaggagattcgcttgaacctgggaggcggagattgcggtgagccgagatcgtgccacagcactccagcctgggcaagaagagcgaaaccccatctcaaaagaaaaaaaaaaaattgtactctaaagatagagctctgtttccacaaattgtatcagaaacgagaggtaacatttcaacatttaagctttcatatgcatttatttttcaaattccaacaaacattttcaagtttgttagaactaaacagaacctactagaatcaattctattgatgtcatttcttttaacatagcaacttatcacacaataagtactcaatgtctgggttttaattgaccaagtaagtaaattgaagaaagtttggaaaactttctcttcctctgacacaattcttcactgttcttttttttggggggcggggggatgaagctttgaaaaatttatttttgcataacataaacatgtcaatctttccctttagctccttccactcctccttcagtgtgccgaagagatactgagttcttccagatttttgcttagctgggtagtttctaaactcaacagactctccaggtaggtagttcctgcacggggctttcctgtcactggatctatgacttttccaactttgaaaatgatcttggcctgttcatgtttcacatgcttcgttcatgggacaggtaaagctctgagaagcacgatatccccagctgtgcactgccgaaggccatcgtgaacaaaggaggttttccacttattataatactttaataaatagggatccagaacaagcccggtcactctcgctttagcagtcttttgtatttttgtcccaatcaccttccccacgatccatctggcatggacagatgaacgaacgacggacatgatgtggctttggtcacctccgccatgactgtgcagccacctgccccagggagcctgccttccttccttccttctttccttccttccttccttctttctttcttcttttcttccttccttctttctttctttctttttctttctttctttctttttctttctttctctccctctttctttctttctttctctttttctctctttctctctttctttctttctctctttctctctttctttctttctttcataccgagtcttgctctgtagcccaggctggagtgcagtggtgtgatctcggctcactgcaacctctgcctcctgggttcaagtgtttctcctgcctcagcctcctcagtagctgtgattacaagctcctgccaccacacccggctaatttttgtatttttagtagagatggggttttaccatgttaggcaggctggtctcaaactcctggcctcaagtgatccacctgcctcagcctcccaaaatgctaggattacaggtgtgagacactgtgcccagcctgacactattcttgaattaacttttcactttcagttgtcaaaaaaaaaaaaaaaaaaaaaaacagaaaataagtgttggtgaggctgcagaggagttgaaacacttttgcactgccagtgggaatataaaacggtgtagccactgtggaaaacagcataatggttcctcaaaaaataaacatagaattaccataggatctagcaatctcacttctgggtatatacccaaaagaattgaaggcaggaatccgagcagatatttatacagtagacccatgttcacaacagtgatattcacaaaagcaaagaggtagaaacaatccaaatgctatctgataactggatacacaaaatgtggtatagagacaaggaactatcatttggccttaaaaaggaaatcctggcacatgcataaagacatgctaagtaaaataaaccagtcacagaaggacacatgatgtatgatttcacttacattaggaatgcagagtaggcaaattcagagacagaaagcaggatgatggttgccaaaggttgggaggaaggggagttgtttaatgagtgcagagcttcagttggagaagaacttctggaggtggatggcggtgatggctgcacaaccatgtgaatgcccttaaagacactgaagtgtataattaaaaatggttgggtcgggtgcagtggctcatgcctttaatcccagcactttgggaggtcaaggcaggcggatcacaaggtcaggagttcgagaccagcctggtcaatatggtgaaaccgcgtctctactaaaaatacaaaaaattagccagacatagtggcgggcacctgtagtcccagctacttaggaggttaaggcaggaaaattgcttgaacccaggaggtggaggttgcagtaagccaagatcgcgccactgcactctagcctgggtgacagagtgagactctgtctcaaaagaaaaaaaaaaaaaaaggttaaggtcaagcgcattggctcacacctgtaatccgagcactttgggaagctgactggatcatctgagggcaggagttagagaccagtctggccaacatggtgaaaccccgtctttactaaaaatacaaaaattagccgggcatggtggcaggtgcctgtaatctcagctactcaggaggctgaggcaggagaatcgctcgaaccccggaggcagaggttgcagtgagctgagatcatgctattgcactccagctggggcaacaaagcaagactctgtctcaaaaagaaaaaaaaaaatgttaagatggtagattgtatgttgtgtatattttatcacaataatttttttttcttttcttttctttttttgagacagagttttgctcttgttgcccaggctggagtgcaatggtgccatcttggctcactgcaacctctgcctcccagattcaagtgattctcctgcctcagcctcccaagtagctgggattacaggtgcctgccaccacgcctggctgattttttgtatttttagtaaagacacggtttcaccatattggccaggctggtctcgaactcctgacctcaggtgatccacaggcaggagccaccgagcccagataacaataaattttttttaagtactcagttgttctttatctcctttggagaaaggagaagagatttaaactgatttcaactaaaaaatttcctgatcagacaagttgccaaaagaataactggaatttcttctctgactgtgtttctcaagtatctagccaggcagtgtgctaaaagctagggacagtgggaaaccaaaaatcacacatcctaccttaatggggctaagagttcagcccaatggctctgaaactttagcacatatgaaaatcctctggtgggcttgttgagcacaaattgctagcacctacactcaggatttctgactcagggggactgggctggggtccaagactcttcatttccatcaagctcccgggtgatgccagtgctgccggtacagggaccaccctttaagaagctctagggcaggaggagggacttgtaggtaaagaagcagtttcaatcaagtgtgctgtgatgggaatccacccagtatacatactaggtaatgcatccacctgtcctaggagaggtcaagaaagcctttcctagaggaggtgttgcagaaattgaggtctaacctgagacctacaggacatgtaggagtcagacaggtgcatgaaagggacagagcatttcaggtggagagtgtccgatttgcacaggtctagaggtaagaacagcctgttcttgaaattgcaaatctttccatgtcatgggcagtcagagagtgatggggaaagtaatgaataaggaagagagaggtgaggtctatcaaaaaggacgttggaatcctacagtttatccacaggataaaaggaagccaacctcaggcaggcttgcagcattcaagaattgaagctctaagaactaaggtgagctcatcagctccgggagaaggcataggtccagtagagtcgcagactaagcaggtggggaagggggcagttgtacatgcccctctaattctcgcatcatctcacacaacccaagctccatttcctcagaaagccttctgctgctcaggtaagaaaaacccaaggccattgtgccatccagtacagtggccacgagccatgtgtggctattaaattagctaaaattagaagccagatcagcagttgcactagcctcatttcaagtgttcaacagccacctgtgactaggggctagaaacaggaacgcttttgggccaggctcggtggctcatgcctgtaatgccagcacttggggagggcgaggtgggtggatcacctaaggtcaggagttcgagaccagcctcgctaacatggtgaaaccttgtttctactaaaataacaaaaaattaaccaggcttggtggtgcgcgcctgtaatctcagctactcaggaggctgaggcaggagaatcgcttgaacccaggaggcagaggttgcagtgagccaagatcgtgccattgcactccagcttgggcaacgagagcaaaactccatctaaaaaaaaaaaaagcagaacactttcatcatcccagaaagttccctaagccagcactggtccaggaaatgaagtataagcaggattagatctaagacttgccaggcattttggttttactgcctgaagccagcaagcaactggtttgggtcttcactcatgaaaacacacacacatacaaatatatacacagagagctctaaattgatttttaaaaaatctatagggtataaagcaagacaattaacaattatacattatatacagtctacaaatatcctagatatcacttttataatgagatataaggaattctggctgggagcagtggctcacgcctgtaatcccagcattttgggaggctgaggcaggcagatcacctgcagtcaggagttcgagaccagccttgccaacatagtgaaaccccatctctactaagagatacaaaaattagccaggtgtggtggggggcacctgtagtcccagctactggggaggctgaggcaggaaaattgcttgaacccaggaggcggaggttgcagtgagcaaagatcatgccactgtactccagcctgggcaacagagtgagaccctgtctcaaaaaaaaaaaaaaaaaaaaaaaagaaaagaaaagaaaagaaaaaaaagaattttcttaagctactaagaagaatcctagaatcatacctattctccaaagccatctgtaaatcctaaaaataaccagtcaagggaattgagggaggaaaacatagtccagattagaattctaaaaggccatttttactgtttacatgccaaaaaaaaaaaaaaaaagctaagcttttaaagctttctctattgtgtattttaccaaagtcagtatgaaggattcaaaatattacatagctaatccttactccaagttctaaaaataaaatgcaagagacggttgcatgccaagttggtaacaaatccctatgccaaggatagaagtggaaattgatgcaaggaggaaatgagttatgctgtaaaatgaaacacacacccaagagaaaggcttaacccttgggctgaccatagcagcaaacactgtaaccagttaaaaagtccaagaagccagaggtagatgataattctacaaattcagagatgttcttgttttcccagctgctccacaaggactttaccagcctagataaacagagcccgccttccactttccatgaaggatcaggtgggcagcttcccagtgagtaaggtgggtggctgagtatccttatcttgatggtgagtgacaggtggctttgggaagtgtactcagacaggacagcttccttgctcaaccgtggtctgacccaggcatattaaggggaggaccagctcagaaagaaagcagagccaagtgtatgcattgcgcaaaacctctgatggccaggaaggcctggccgccattccctagagccacgcattctgcctgccccacgactcttccatcctcagagccgtatttcctcctgggcctgccctgccagatctgattggctcccttctccctgctctgctattaaatgccttccttgggttcaaataaagctagtttctctagagcctttctaggtatgcccgtgcgccttcccactccaaacccactgtgaatggaagaccattcattcaccaattcctcatttagttaaaaatcaagacccaccagcaagaaactcagtgcaaggctccttggaggtgctggggtaaagcaagaaactgctagtacttcattaagccagtaggcaactggtttgagccttaattcatgaaaacacacacacttcactctaaattgatttttaaaatatcataaatgccatcggactatctcaaatggcaagaaacggccaaagatgactccagagtagataattgaaatggatgtggggaaagtaagctcattcaggagcactgagcctggggcatcccaaatgcacagcaaatagtagatctgatcgaagaacttttatttgtaattctgatttcataatgtattaatgatagcaccagctagcatttattgagccaatgctatgtgtcaagtaccataccaaacatttaacacacacaaatgcatttaaatatacaaggatccaataaggtaggtcctgttattccccttgtataaatgaagacactgaggtcaagaaacttgtccatggtctcacaagtgtgcggtagagtccagattaaaacccagccagcccagcatcctgctcataaaaccctcatgctgagaactgctgaactgcatttttttttttttttttttgagacagagtctcactctctcactcaggctgaagtgcagtggtgcgatctcagctcactgcaacctctgcctcccaggttcaagcgattctcctgcctcagcctcctgagtagctgggactacaggtgcatgccaccatgcccagctaatgagaactgctttttcttgcactcaggcagaagtgcctcagcctagcaagcttccctaggtgcccacccaccccagctgccaatgggaaccgcagtccaatatttcacatttcggttagatgtctcaaaatttgtttagcactttccagagcagtccacaaaatgccacttgccttgacaggcctgtgttctatatgcaatggcaccacagaatttagttaccatccactttgcctccatccagtttgggatcttcctcactccgtgagacacaaggctcctttctcctgcctccagccggcccaccctcagaacagggtacccctggagccaaattgttgaggcaggagctccagatgggtagaaatgggatagaggagaaggagaggctgagacagggactttgagatgcactgcaagccagccagtggggaggctaccccttgggggcaaaccacacgcaggggacaggtatactggggcttgcctactgcggcagatcgcaagttcatggcaatatacctgtaggtgaaaacatgtcaacatgccccaatgttaaggacagaacagcaaagggacagtcagatacgagttaaagtcaccgttcttctagaaacatggatgtgaattttgtttgttttgttctgtaacagagtctcgctctgtcgcccaggctggagtgcagtggcacgatctcggctcactgcaacttctgcctcctaggttcaagcgattctcctgcctcagcttcctgatagctgggattacaggcacgtgccaccacacctagctaatttttgtatttttagtagagacagggtttcaccatgttggtcaggctggttttgaactccttttcaagtgatctgcccacctcagcctcccaaagtgctggaattacaggcgtgagccattgcaccctgcctggacttgaatttttgtcagaaagagatttgcaattaatgctgattgcaactgatggcagaattaagatggtaagtcttatatcacaaccacctcctaaaatcaaaatggagctgtttctgtaggagtcagactacctcctttagaggatatgggagtagtccatcactcattcagacagttttattaagcgtgatatagtctacctctctcagcactgggcgtggtgcatctcctattgttaggcaattcccttacttcctgatccttcaattcacttacttcctgatccttcaattcactttctttataattacgaaatggtctgagataaccaggttccccttgctcaagcttccaaaaatcaggctgacaagttacatttggacatctgctcttcaaaagccaaaggcagagttttctgttaaataatgagctgtccaagcatattttgattcattcaggccacatacagcagcaggagtttctgggtggtgcctcaggtctaaattttactgtaatcctacaggttagaaatcaatgagctgatcagaacatatccagtttccaaagatatgagtggcaccatcaatataaattagttctccagtaatgtcaaagggcacacttagcagtgctgtcagaacaaccagaaaaaccacattcaaaagggaacacagcctaaggcacacaactcatgataaatacctgggaaaaaaccagttagctctgcctttagctgttcccaccccaattttcacgattaaaactacaatcgacatactaattagtcggcagacatctctataatgtttatactcctaaaaaacatgttatgttggttaactgaacctatacaatacttagaaatctccctaaagttatcctaaaaacaaaacaaaaacaaaaactttgcaagctttctgagttcaaacctgtaattttgttacctatcagtgctttataaaagagctaagataattataaggaacaagcctcctaaaatgtaaaattccattgttcctctactacccgcccatcagtggcaaataaacaccttaccatgacattcactgtgagtattgctagcgggagaagtggaggagaaagcagtcaattatacctgatgatcagggatggagagagacaggagggatgctgagttggccttgaaggtcaagtcccaagctgggccactatctgattgggagatagaaagtgagaggagaaaggcatttctggaaagaaatccctgggggcaaatattctgcagcactgaaggcacacaggattagttcagttactaaagtgcgggtagacaggggaggaagaagaagagagttggaagaggagactggaaagcagactgaggcaaggctgggaaggccttgggtgctagcggcatttggaatttgtgtgctaagcagggagaggccatctgagttctcccatgcattgagtaaacaacacgtcccgacctcgtggcaggtattcagtcagctgctggtgagcaacgtggctcctgtccctatgaagcttaaagtctaaggtaaggcagaccctaggaattcggcgcacagaagcctctctgctgtgatggagaagtaacagggacgatgaggacatagagcagggaagggggcctaggaagctattctggaagaagtgagttggttcctgaagttgaagcacctgcagaggtgaggaggtggggagcagaagtgcaggatccatctgtgcaaagaggctggggcctcaacaacatgaactgttttaatcagatttgcattttagaaatgataaccctaggcctggagcggtggctcatgcctgtaattccaacactacgggaggcagaggctctactaacaaatctctactaaaaatacaaaaattagctgggtgtggtggtgcatgcctgtaattccagctactcaggaggctgaagcaggaaaatctcttaacacaggaggcagaggacgcagtgagccaagatcacaccattgcactccagcctgggtgacagagcgagactctgtcttaaaaaaaaaaaaaaaaagaaaagaaagaaatgataaccctgaccaaggactccaggaaaagatggtgttaatctgtggccaagacaagagtgcagaaagtccttactgtcctctggcaacaggggccaaaggcggaggctaataaggtggtgcagacagaaagggtgggatttctggcagaactttcagaggcagaggcagcattttacaactcacttcatccgggcagggggtctgggaggaaaaacattgaaaaaggtgcccagtttctagccttagcaactgctgcaggcagctgaactctgcaagggttcttatttggccctgacattctatacgcacttattagcattttattcaagaagagggtggttcccccaaatgtttccatatttagccaaaggaagctaaatttcaaacttcaagtgtctactcaaacctaagactgaacccctcaatttccctcataactccattatcccccaggcttcctcacgtcagtaaaaggcaaccccatctcccaggtgctcatgccaaacacctagagtcatgctggagtctcatcttccctcctaccctgctccctattcatccgtaagccctaggctctgccttccaaatgtttccagaacctaaaacctctcctcacctccctgcaagctgcttggctgaagctctgttctccctcacccggattagaggtagccccagacagcatgcccttcagtctagctccaacatggagggcaggctgattctttccaaaggtaatcagatggagttactcctcggctcgaaactctgcagtgggttctcacttctctcagagtaaaacccaaaatctacctgctctctttccctctcatctacagccaccctgctgtctccctggtcctggagcttggggccacacagtgtctgttcctgtacctggaatgctcttcccccgtagccacaaggcttagcccctcaccttactgtcctagctctaatgtcacctttttaggagcccaatcaatcaccaccatatttaaaccccagccttgccagtcccccttctttacattgttgtccatagcacttctcatctgctatcagactttaaaatttattaggctgggcacagtggctcatgcctataatcccagcactttgggaggccaaggcaggtggaacacctgaggtcaggagtctgagaccagcctggccaacatggcgaagccccgtctctacaaaaatacaaaaattagctggacatgatggtgtgtgcctgtaatcccagctacatggtaggctggggcaggagaactgcttgaacctggaggcggaggttgcagtgagctgagattgtgccattgcactccagcctgggcgacagagtgtgagactccatctcaaaaataaataaaatttatttattaataatctcttctaaccggaatgtacactcccagagcaaagggatttttgcttattttgtttagctacatccccagcacccagaatacagtacaatgtacggtaactatcttacagatgtttgttgactgaatgaaaagtcacctattaataaggctccctgagtcacctggacaaaatagtaagccctcacctcttttgcccttcatgcttatttatttttccttgcatatatcatcaacgtgtgataaatgttaataccacatattagtgtgtttattctcttctccacacaagaatgccaactccataggggcaggaatcttgtctcttttctctttgttgtatgatgaacacccaggacagagcctggcacagaggagatgagaaagagaaggaaggagagacagaggtcaggtgtggtggctcatgcctgtaatcccaacactttgggaggccaagaggggtgcactgcttgagcctggagagttcgagaccagcttgggcaacatggtgaaaccccgtctctacaaaaagtacaaaaatagtagttgggcgtggtggcatgtgcctgtagtcccagctacttgaaaagctgagtcgggaggattgcttgagcccaggggtcaaggctgcagtgagcaatgatcatgtcattgcagtccagcctgggtgacagatggagaccctgtctcaaaaaaagaaaagagaaagagaaggaaggagggggagagagacgaaagaaagaaaaagaaaggaggagggaaggaggaaggagaggggcggaatggagggaaaaggagaaggaaagacagaagaaggaagagagggaggaagggagaagggaggaaagagaaagaaggagacagggagtgcggaaagaaatagaaaggaggaaggaattctaactccatattatcaaggtcacagatgagtagcctaaaataaaaaattggttgttctacctagagcaagagattctgtcaggattctgtcagagagcagtgaaacaactggccatgtttttttttttttttttttgaaatggagtttcgctcttgttgcccaggctggagtgcaatggtgcattctcagctcactgcaacctccacctcctgggttcaagcaattctcctgcctcagcctcccaagtagctgagattacagacatgtgccaccacacccggctaattttgcatttttagtagagacggcgtttctccatattgatcaggctggtctcaaactcccgacctcaggtgatccgcctgccttggcctcccaaagtgctgggattacaggcgtgagctgctgcgcccagcctaggcatttctttaaaatctatccattcatgtgctccattagtcaaaataaaaggcaatatctagtaatgatgccaggataaggagtaggctacattggattctaatcaaaggaggcatgagtcactgaaaaaccatcatcatttgttggctgctttcttctatagtttctgaacaataaataagaaggattggccaatcttgttacttggcataataaaccaggtaagcatacttgatgattcaattccatttggaaccgatactacacgttaaggaaacaaaactaacattggcattcagctgagttctgtccaacgaccctttgcctccactgtgtcttgttgggcatgctgctataattttaaaggtaatgactgtaatagtaccacctcgcattcatgtgagttcacgtgaattaggcttctaccactcttgaaagtaattttaattatctcgtttaatgaccttcaccttgcaggaaagaaacagagacatgaagaggttaagacaagtgacggaggtctcagggccaggcagggaaagagtgacttgttttggagggtgggagcccacccacacaatcaaccacagtcacccagatctgcccactgaggtgagagaaaggaggggaaataaaacagcaagcccttttctttcctcctcatatctgttctcaggactcatttcctgtctaactcagagtcaccttagatccttaaaagtgactggaaccaagtcactaaaaaaaaaaaaaaagaaagaaaaaagcaattatttttcacaatgtgaagccttctttgggagaagttggctagaaaataataggagaaaaggctggaacaactgtctaggacatttcctaatatgttattttcaccccccttccctcaaaggtcaacaagatactccactgtggaagcttcttcaaaagcagttcatctggatgtcttcaatactccagatggcttctctaagtcctactccaggccgatcgttatgcaatctgttatcttcctttccaactgttttctcaggcttttttttttttttttaaatagggtatcactgtcgcccaggctggagtacggtggtgtgatcacagctcactgcagccttgacctcttgggctcaagtgattcctcccacctcagcctcccatgtagctgggactataggcatgtgccaccacacccagctgatttttacattttttgtagagatgggatttcgctatgtttcccaggctagtcttgaacttttgggttcaagcaatctgcccggctcagcatctgaaagtgctggaattacaggtgtgagccacagtgcctagccaggctaatttcttatctattgaaagctggaatccaatgcaggaatccaatgcagaaactatgtaagatttcaatctgttatatatctaccatcttcctgagacaggccattgaaagtcaaattccactgtcatttgttccaggggaaaaaagaaacatgaatatatatgtttgtaaacacaaagatgatttctaaaaagataaccaataaactggtgatggcccgtgcctttgggtaggagagttgggtaactgggttaaaaggaggcaggaaaactgacactttattttttatttatttatttattttgagacagggtctcactctgttgcccaagctggagtgcaccggtgggatctcggctcactgcaacctccgcctcccaggctgaagtgatcctcccacctcggcttctcaagtagctgggattacaggcatgtgccaccatgcccagctaattttttgtagtttttgtacagacagggttttgccgtgttggccaagctggtttcgaacttctgggctcaagcgatcctcctaccttggcttcccaaagttctgggattacaggcgtgagccaccttatctggccaaggctgacacttaatacccttttgtacctttcgaaggttgtaccatttgcatgtattacttattccaaaaattaaatgaaaaaacaaataataggtggaacaaaactgaagcttggaaactgtgggagccctttatcaggaaataacaaacatgatggtatcacatcttgactttccagtgatggtcaacaacagaagcatttaccagatagtgagctccccacatgcaagcggcaactttaattgtaccttaaatctttgcccttgtattagttatctgttgctgcctaacaaaatacccccaaatttagcagtttgaaccacaagtatttataatctcagtttctttttctttttctttttttttttttttgagacggagtctcgctctgtcgcccaggctggagtgcagtggtgcgatctcggctcactgcaagctccgccttccaggttcacgccattctcctgcctcagtctcgggagcagctgggactacaggcgcccgccgctacgcccggctaattttttgtattttttttttaatagagacggggtttcaccatgttagccaggatggtcttgagctcctgacctcgtgatccgcccgcctcgccctcccaaagtgctgggattacaggcatgagccaccgcgcccggcctataatctcagtttcaatggatcaagaatctgggtatggctcagggtctcctcccaaggctgcagtcaaggtgtgagccagagctgcagtcacctaaaggtcggcctggggatgatccacctccaagctcactcacagggctgttggcaggattccatcctcttgggctgttggccagaggccagctccagttctttgccatgaatgtctctccatggggcagctggcttctcttacagtaagtgagagcatgagagagcatcagcaagagggaagtggggtgtttctgtgccccagcctcagaagtgacatcccatcactgtggccatattttattcactagaagggcatcaccaggtctaacccctgctcaagggagaggatttcccagaaacagaagaaatcacaaattacacttcacaagaatcctgagatattttagaaaggttccaaatttggccaaaagtagcttaagaaggcttttatggaccaagcataagaagtttagcagggctgggtgtaatggctcacacttgtaattccagaactttgggaggctgaggtgggcagattgtttgagcccaggagttcgagaccagcccaggcaacatagcaaaaccccatctctacaaaaaatgcaaaaattagctgggcatgtgcttgtggtcccagctactcgggaggctgaagtgagaggattgcttgagcctgggaggtcgaggctacagtgagctgttactgcaccactgcactccagcctgggcgacagagtgataccctccctcagaaaaaaaaaaggaagaagaagaaggagaaggagaagaagaaagaagtgtagcagcagagagaaattacttcactcaaaccagcattgagagaggcagagaattaggagcactcacaggcagagctgaaaggctcccagaaggggcaaaaataaaatgtaaaattaacctttgaaatccaaagttggtatcaggtatagcctaatgttcactttttaattttagcaacaccgaacatggtatttctaccttatttttagtataattatccattcttaacttgtgtaatgaaagaaaaaataggggcgggcatggcggctcacgcctgtaatcccagcactttgggaggccgaggcgggtaggtcacgaggtcagcacttcgagaccagcccaaccaacatggtgaaaccccgtctctactaaaaacacaaaaaaattagctgggcgtggtggcgggtgcctgtaatcccagtgacttgggaggctgaggcagaattgcttgaaaactggaagacagaggttgcagtgagccgagatttcccactgcactccagcctgggaaataagagcaaaactccgtctcaaaaaaaaaaaaaagagaaagaaagaaaaaataacaaaaataacataggtaaattaacagttataatattaaacagtctcttttggctaaacctgttataaatcaccacggcatataaatgttagagcttagatgctgaataaaccaactggccttgaagcccacatttctaattctcataacagatttattatgaatctcaaatttcacaaatttgtctgtctgtgtaaaattgttttggaagatgtcaataaatgtagaggaatgtttaaaatctgaagttggaaaaaggtaaagcaaacattagtttttaatcttttgctcacttgagtaaatccttgaaaggattaaaaaatatccaacttgtgaaatttgtttaaagtccttttaaaataaaaatgcataaatgtataattactctaaacctaactgaagactttatagaattcacccaatttgaaaacaggtcttctggcctgtttcccaagtcattatgcacagctgtgggaaacatcctgttgtatgtttacatatattaacagcttcaggaatttcacaattaaaactatggtgggctggtttccaattcaggcagctgggtgagggggtgtggagagcaggcaaaccagaaataaaaacaagcttcttgaaagatgggggaaaggaaatcgtaactacttagtaatcaggagtccatatagtttgccagttctactaaacgctggagggatttcatttaaaccctaagaaatacacttgttcaatcattttgcagccttcaaaatctctcagttggcttcaaccaagaggttgcctgatggaggtaatattgtacacgatatgtaaaaaacttttatttttttctgtggacagtttcaccccaacagaaggaagctgtggtttcacctttctctcttttgtttttccagcatgcctgcccctcgtcctgacataactgattaggaaatgatttctaaatggtcaagagtccagcctcgatagccacttctctgattccaacagaatttctacagaagacaatttccttgtctcagcaaggtatgtatgatatatgtggcctggccaggccggctgctcaaacagagctgtgtttgggtcagcccactgtttaaaatgttaaaatcagacatgaagaccattcacataaccactgctggtcagatatgagtcatctccaagaacaccaaaaaaggaagcattaaatgctgattggtctccttcaaaatcacttgggaaactccagaaagggaagggataaaacacaggaacttctacttcttcaaagtctcccgaggtgatttttaatactcagaagttgggactgagttcctgatctaggttgaagtgtaatgtgaattccattcttgccagtaggtgcgttattttaatcattatctttattcttgagactgtttcactccatctggagacagctttgttgagttttggcaacactgcagagttgttaaaatcataaaacagaaccacctgtttttgagctatatgggttattagaaaaaatatccaaaattctttatttttacaagaggaatccagagctcagaaagattaggggaggtgtgagtgctgaacttgtatttagtctccctgggcctcagtgtccccatctgtaaagtgaaaattaatatattcattaattgatcagttattgaatgcctactaggttgtggactccagggatgaagaagatacgtgatctctcactataacttaaatcctaacacagactgttacagttcaatatgggaaacataggtgggtgcagtggctcgcaccagtaattccagtactttgggaggccgagatgggaggatagcttgatgttgatgccaggagtttgagaccagcctgaacaacataaggatacccctgtctctacaaaagaagaaattttaattagccaggcatagtggcacacacctgtagtcctagccactcaggaggctgaggctggaggatggcctgagtccagaagtttaaagctgcagtgagctgtgtatgatcaggccactgcactccaacctgggcaacagagcgagaacccatctctaaaaaccagtaataataatatttaaaatacagtaaatgccaggagaagacaatatgctcaggttgcagtgggagcttggcaaaaccatacctaacccagcctgggaagcacatgggaggcctctgccatagggcagaaagctgctgcagtgaaatccatttaattggagaatggagcagaaagggcagaagatgcaaagaagccctgctgtctatagaatttgcgaaaataagatgaagcaatagtttgccagcagcaaataactacacagatatgagctatgaaattaagtaagactcatcaaggccacccacagctgctgcgttgcagacgccaatccagcatccttacgttacaccattcatttatttcaatcattttccccataggtttatatctagacatttccataaacccaagtaaattttttattatgcgtgtaggcatcctataaagagtagactcttacattgtctactttccaagccattctctgtcttgactacgcatgagagaatcagccaggtttatcccagactggctaataagactctggcaaggagaactcaggcatcaatgtttttgatgcttcccaggtgaacttgagaatctcatttatcaaaaagtcaagaatgaatggtgcgcacacacacagacaaaaaattcttcagtcacctctggtttatgcatttttagaaaggctccagataatatgaaatctatttgtttgagccttgactataatatgattcttttaggaaaacagatttactgtctaaatgatacctggctcagattaattctagtttgtctctttttttttttttttttttttttttttgagacagagtctcactcttgttgcctaggctaaagtgcaatggtgcaatcctggctcactgcaaactcgcctcctgggttcaagcaattctcgtggctcaacctcccgagtagctgggattacaggcacccaccaccatgcccagctaatttttttatttttagtagcgacagggtttcaccatgttggtctggctggtctcaaactcctgagctcaagtgatctgcctgcctcagcctcccaaagtgctgggattacaggcgtgagccacggtgcccggcctagtttgtcttttctaaagatgcactggctgaagggaggcggggacgttcctagaagtatgatgggtgacagagaacacactattcaggttaagaatgctctacagagagactataaagtagaaactgtaaagattacaggggaaagagggcatctgatggaacgcaggcatggataagataatatttatatatctttatgtttaacaaaagttctaacatgcttactgtggtcctttgaaactgatgacaggcacacaacagggtggacacatatggtttaacaaacaagtcttttttatgtatttatttcctttaataatatagaaagactgtggggaataagaactttaaaaatatcgaatatgcctggtagatgctgccttaagtgaagcaagactcctgatattcacaagaagagacaatataaaaggaaattgaagaccgggcatagtggctcatacctgcaatcccagcaatttgggaggccaaggcaggtggatcacttgaggtcaggagttcaaaaccagcctggccaacatagtgaaaccctatctccactaaaaatacaaaaattagccaggcatggtggcacgcgcttgtaatcccagctactcaggtggctgaggcaggaaaattgcttgaactgggaggcagaggttgcagtgagctgagatcgcgccactgaactccagcctgggtggcagagtgagaccccgtcttaaaaaaaaaataaaaataataaaggaaattaagcattgaagaaaacacagaagccgtctcctctaccatacatcgaagggcgcatggtgacagagctgttgtcatttcaacagtatttctgggcttcccctgttctctacatccttgctacttgaaaaagaaagagtgagcagaggacataactcaggagggactcctactttaatttttactggggtgggcagagactacgctgaagaaatgacatttgggccaaaaggcaaaagataaggagcctttcagaggaagagcttttcaagcgagaaagcagcaaatctgaagttcctgggacaggaagggactcgtcatgcttcagaaactgaaggagaaaaagaatggaatttgcagggggaagccggggtcagggcgggctgggcatagagagctgtggagagaaggtagctgttgttaaaaccacagcatgagctactgcaagggttggcaggatctgagtgggtgctctggtttggaaggggcagggtagaagtgtagccctcatgtaagaaggctactggaatggtccaggagagggaggatgacagcttgaacctcgcggatggcagcggagatagaggttatcaggtggagtcaaggtcttccagaggtagaagcaacaggccttggagacggattggaaatgaaagcagggtgcagtctggaagagaaaggggtcagagatcaagtccaggcttaagccagaaggcttaagcaccagctagaggggtatcatcttctcaactgatgtcagagttcaatgctcgaggtgctgtgtttaggggcatgcaggagagtattatgaaacgtgcaggagagtattatgaaacgtgcctatgactaagtcctgcgaaaccgtagcattttaagaggactcctacccgtggtttagggtagaattcctcagcctcaaccctagtgacgttttgggtaagatacttctttgttgtagaggctgagctgcatattgtaggatatttagaagtatccctggccttgaccactggacgcttgtagcatcctgaattgtgacaacttaaaatgttccccagggagcaaaagtcacatctggttgactaagttaagtatacttttacaaagtctttaataaactggtgccggtcttctgtctcaaaaagttcacgggcaggccagagtaagagcttcacaaatcatttcaattttctcatgttccggctttgttgacaagcacctaaaattgactttaaaaaaccagacctagtattaaggtggatgctgcctcatcgaattagaaaacaattggagttatactaaccccaaaatacacaagatcttgaaaaatctttatcctttgtcttttgacaacaacataaacccaaaatagagcagtgagtggatataggtgttagctggattttcccctgtatgtaaatatttcatagctcagagttatgggatggtgtttatttcaaataacatttgtaaaaatatctctaacccaaaccaaaatgccataagagtcctttttttcctaagtagatgcttaaaacaaattcccgatatttttgttgcatttccaaagtatggcagtaagtatcaaaagttagtgcaaaaatctttaaatatctatttttgttgttgttgttgttttgtctcgttctgttttgtttttttgagacggagtctcgctctgttgcccaggctggagtgcagtggtgcaatctcagctctctgcaagctccacctccagggttcaagtgactctcctgcctcagcctcctgagtagctgggattacaggcgcgtgccaccatgcccagctaatttttgtatttttagtagagatggggtttcaccatgttggccagtctggtctcaaactcctcacctcaagtgatccacatgcctcagcctcccaaagtgttgggattacaggcatgagccaccgtacctggccgtaagtatctatttgtgtttgtgactattatactaagttatgaagtccaagaaagaacttggttattctcctctggcagcttagtgaaggagtaaaagccataaaattcacttaattaggccacggtggattcttttcattgtagagtcactataaaaacagccaacaattattggttcgatgttgttcaatggccttctctctcataaaacatgtgtctaataacggcagctaatgctagtacctatcagtgtggaaaggcatgtttctgactttactatttaatgtgtaattatagaacaggtgctacaatttaagaactgcgctgggggctgagctacaacatgagtcttgccaaggtgctattctcaccaaggtggccactagtgtaaacacagacaaatagaccagcaatgacaatatagctcagggatgccacacccctaggcccacatctgtcctgcttctcacctgctcaaggtgacaggactaaggaatcctaacacacctttgctgccgtggctggacatcacttcagaatccagctcgtcaaaagcctctcagccagggattctcaatctggagcaggcatcagaatcacctggaagttttattaggacactgattgctgggtcttaaccccagagcttctgagtcagtgactctagagtgcagcccccagtcatgctgatgttgctggtccagggaccatactttgaaaaccagtgtctaggcaaccaccactgatcaagccacatctgatataaaagctagctaccatctccgagatggtaccacctatgctaagatgagaatgtacagggaaccactagaacaaaggaagagtccctcactttggtctgggaaagacaaggaatcaggaaatcttccaggaggaggtagcacctcaagtgatccacccatctcggcctcccaaagtgctgggattacaggcgtgagccactgtgcccagccaagcccctttatttcaaaaacacaatgtgttcttccaatggttcatgaaaactagaaacacaaaaaaatgttaaagggtgtttttaaaaattaaggtttgcttgaaagagatactcttatcttttttacgtctagtaaggggtattgaaatacagcagatatggagaacaacatcgacttggaacagaagaatgacccctaacaacttagagcttagacaaatttgagagtttacaaagactgccagacaggatgttatgttagaaatacatttaagcgatattaaaataagtattcaaatacaaaattttgaagacaggaaacttcataatattcatgttaaattctcaggatcctctggaccggaaatcattgtataatgcctaagatatcgtggcaaacaaaattttacaagcaaataaaatgtactttagttctcacaacggtcaccaatctttatatacccttagtcctctgccaagtgcaattaaagccactttatgcttactgatttccttatgacacacacacaagaacctaaaagacaacataaattcgtctgataaaaagtgagcctaaaagctccatctagagcactgcgagaggagctccatctagagcactgcgggaggagctccatctagaacactgcgggaggagctccatctagaacactgcgggaggagctccatctagaacactgcgggaggagctccatctagaacaatgcgggtggagctccatctaggacactgtgggtggagctccatctagaacactgtgggtggggagtgttggctccgctataccatttcctcttgtaattttggcttctttgtcatgagcttctttttcaaagttggcttttagagcccattggttactgatatttactgattttcagtttttaaaaagtctattcctttaaaaatgctctaaagtttgtcaaacctcaggggttagatacctttttgaatgtcagtagtttttctgaaggtttaacatctatcaaaatagagaaaaaacacctttaaaataaataggcctcatttaaaattttatacatcttctaaagggacctatatagtatccattgtgtagacatgacagtactggataaaagtgaatattagtcccagccacttgggaggctgaggcgggaggatcccttgagcccaggagtttgaggctgcagtgagccataatttgacactgcactccagcctgggcaacagagcgagatccatctataaaacaagacaaactgaatacggaatgaacaaaataaaacctattgtctatccctgctactgaaacacatatattttattgtcatctggacctacaaagcttgaaatgatttacaacctgtacattttaaaaattggaagcttatgacaaatgagatcacagagaggcatggaattacaatgagagggtatcctataaaacatcaggtccatcatttgaagcacgaaaaaatcggagcttagaaaattaactggccgtgcatggtggctcccagcactttgggaggccaaggcgggaggatcacatgaggccaggagtttgagatcagcttggccaacatggtgaaaccccatctctactaaaaatacaaacaattagtcgggcgtggtggtgcccatctgtaatcccagctacttgggaggctggggcatgagaatcgcttgaacccaggaggcagaggtcctggtgagccgtgattgtgccactgcactccagcctgggtgacagagtgagactcttatctcaaaaaaaaaaaagaaagaaaggaaaagaaaagaaaattaactgctcatcactgaactgaaagttaggaaaagagtaccctaacccagttcctggcaccacccactcccccaaaccctgcttcccttgtgtttctcatctgtcccatggggataattcctgtcttgccaactcccaaatgaggagattttaaaactataaagtgctttaaaaatgtaaagaattgctattattagctgaggtcagccagcccattcagtgactcaccagagctgacatctcctgggcttgtttcccaaaaccaggctgctgtttattacaaatcatagatattaaagatggaaaaaatatcacaacacagcccttttaggagaataggaaaataaatcctccttccactcccacccccaaataaaacaaaatgcttggcagatccaggagtttctataaggagcttgaatatacaggaagtccacaaattacaaatgattttgtgttccaagagttcatttctgggtgggttaccagatgaaatataggacacagagttatatctgacattaacataaagaacacatcatttttagtgtaagtcagtcccaaacattgcataggacacacttatactaaaaaaaattactcatcatttatctgagattcaaactgaactgtgtcctgtatttttatttgttaaatttggcaaccctatctctgagtcatttggatcgattttccaaccttcggctgtgaggtctcggaaagaaccctcgccttgtgagtctggaaacacgactgcaatttctggttttgtcaattactagttctgagacttcaggcaagttataattcctttgcttgcaaaaagagaccaggaaattaatacaccacgggactaagtgggtcaatataacatgtggaaatacagtacattgagcacaaaagcagcaccactttgttatactaccctacacacatgaaaagagtgatttggtttttaagtcaggccacacaagccaattttaaaagtcggttttccacaagaaattccctggctttagcaagttcctataccatacaaagcgcccctttcccacatctgagaacgttttgagccatgtatggtggtcttgtccactaggcaaccctgtatcagccctccaccctgtcatctttgtccataaagcacggcttgtgactttgcacaaatgcttttttttgctcacatgtacatactttgttgccaaaaaatagtggattattttacataaattagtgcaaactaaaaggctgataccaatgataggaagcactggcttccgaagcgtttccagcatccccaaacagctccttaaacccaatcctatgttgcaattcccaaaactgtgtctccaacctagacttctgaatcaccaatgcttgacccccgaccacacctaggtgtcccagcaactcaaactaaacatgatcaaagctacattcatcttctaaaactactccttggtctcagtgatgccatcacctttagtcgcttatgttagaaatttgagaattgtcaacaattctcttcttttacatcttcaaatccaacccatcaccaagaccaggattccccttgtgaagtgcggctcctaccttccagttctcatccccactcccatcatcgggcccaaacccccatcctctctctctcatggacactgcagcagcctcccagatttcctctccttgcttctggcctcattccctgcccccacccccatcccccaccaacaaccaacccattccccatatcgcagtctctggattatcaaacaaaaccaggaatcaaatcacatcacgccgctgcttaaaaatgttagtgacttcctatcaggttctctgcagtttggtgcctgcctcccttatcccatggtagccccagcatcatgtcacacccagtattctggcctctcacaattcctagagcacagcactaagctctcacccaccccagggcctttgcacatgcggttcccattgactggaccactcttcccctgactggtactttcttatcctctaggtctcaacttaagtataacctccttcaagagaccccactccctgggccattttttaaattatggtaaaatggacaaagcataaaatttaccattttaactacttttattttatttatttttttgagacagagtcttgctctgttgcctaggctgaagtgcagtggtgcgatctccactcactgcaacctttgcctccttggttcaagcaattctcctgcctcagtctcccgagtagctgggattacaggcacgcaccaccacacctggctaatttttgtattttttagtagagatggggtttcaccatgttggccaggctggtgtcgagctcctgaccttaggcaatttgtccatcttggcctcccaaagtgctgggattacaggcatgagccaccgcgtccggccttattgccttctaagtgatattaagtgcatccacatgattctgcaattgctaccaccacccatccctagaaatttttcatcttcccaaactgaaactcagggtccattaaaaactaactctccattccccactggctccagcccctggcaaccactgctcagttttctgtctctgaacttgactattctgggcacttcatataagtggaatcacaaaatatttgtttgtccttttgcatctcatttatttcatttagcataatgtcttcaaagttcatccatgtagcatgtattaaaatttccttccttttttctttttcttttcttttctttttttttttttttttgaggcagagtttcactctgctgtccatggtggagtgcagtggtacaattttggctcactgtaaactccgcctcctgagttcaagcgattcttgtgtcatagcctcccgagtagctaggattacaggtgcccaccactgcacctttttgtatttttagtagagacgggggttcaccatgttggccaggctggtcttgaacttccggcctcaagttatcccccagcctcggcctcccaaaatgctgggattacaggcataagccaccgtgctcagcgaaaatttccttccttcgtaaggctgagaaacatcctaatcatatgggtacaccaattttgtttattcattcattcgtcggtggatgcctgggttactcctaggccattttaaagtaggtcttcattattctcttagaaatatcttatttttctttaaggcctttatcacagattataattctaatatcaagttgtttcatatctcttttgttcaatattttgtttagtctctatctctcatcacactctcaacaaccccataagctccctgaggggaagggcatgtctgctttgctcctcactgtgtttactgccagcacctggcaacgtagtgggtatttaataagtaattgttgaatcactgaatgaaagaaaatcactaggccacctgaaggccccttgtctttagagtcactgtggaccatgtaatcaattgtgaaggtgagccaatgcatacttacatccacacacacatatttgtagctctctgggcacaaaacattccttttataacatgtcagtctatttgcaactagcacacatttccatggcctgtgctttttttgaaggatgtattacgtgcaccagtagctagtgtgtttggcaatataaagaaattaagtattgacaaataatacaataaggatgaaattttattaattttttttttttacaattaaaaagaattgagacagggtcttgccacgttgcccaggctgttctcgaactcctgagctcaagtaatctgcccacctcagcctcccaaagcgctgggattacaggtgtgagccaccacacccgaccgtaatatacatgaaaaacatcatgctaagtgtaaaaagatgatcacaaaagaccacatatcatacgattccatttacataaaatgcccggaatcggcaaacccacagaagcagagggtagatgagaggctgccaggggctgcggggacaaggcgataaaccaggcagagctaaaaggtacaggatttctgttaggggtgatgaaaaggttctgacgtagattgtggcaacagttgcacagctatgtaaatatactaagaaccattgaattgtatattttaaaaggctgaactgtatggtacatgacttagatctcaatatagttgtttaaaacaaaaaaatccatgtgtatggagatggggagtggctggaaaaagcttaacctcccaattaggcaaaagacaaacaggatagggagggggactaggggcttgtgagtggcaatagctgcagcagcagccctggcaggacagcctgtgggttacagaccgccctcctgtcaatgaagtcaagtcctctgcttcctgaaaaccgcctcttttttctaacaatgttctttcccccaaactaggaagacaggctgatggtaaacacaaagttctctgaaccaaagccttatatgtatgtttctgaggaggctctttataacctagttgcaagcaatctgaacacagcccagcgaatttccagcttttgaaactcagatttccttttgcgacccaggttctgctgagaaagttatctttggctcctctctctctcacaccccacatcccatctgttcggaagtcctgttggcatttcgatctatcaaaataaaagttgcacgtatgcctgtgtccgatcccattctctctgtgtcctttctcctctgtctttctcaagaatctgacatctcagccccacagctaccatcctggcggacactaccaccctgggaaaagcttccaccctcacttgcctggctttgcctcctgcttgaactcccggattgggagccttctgcctggactggtcttcacacagatcacaccactccaaggagcaatgtcctgcactgagccatcttccaagaaatcaaagccaaagtctttacatagcctggcaagccctgcaagacctggctccccttcctctctgcccttacctccttcttctccttccctcccccacttactctttggaggaacagctagataagccaagcactcttaccctagggcttctgcagcaagttatctgtcccctctgcctgggacactctttccccaaaacttcctgtgccaccctctctcctcctgagtgtttgctcaaatatgaccttctcaaggaggttccactggccactctatttacaatggcagcttgcacccttgccctcccattctctcggtcccagtgacctcaaagattcagggcatgttagctgctacttacatcaccattcacagcctaaggttctcaaattgacttttaagaattttcatgttgttctacagaaggagagaaagcctaagactgataacaaaagtctaaatgctcttaatgcagctgaactagacaaataaagtatcagatcgccaagagattaaccatgttaaccccagtattctttttgtggctgtggttggcattaaataggaaagtgggtggacacgtagggatagtagtatttttggttggcttcaagctttgatgagtttttgtgtgttttgttttgttttactttaaaaacctgctttttaaacacgtaaatccttatttggctaattttcagggcacagtgtgagtataaactcatatgagagtctattgttctctagaaactacagattaaggtgtctttaacagactgatgtctaattattacataaaggcatctgatttttataccaggacacctataagcacattattatagaggtggaacatttgataactctgccatgctacagtctgtaactgaccttttgccttgccatggattctaccctaaggggaaaaacaacctgacattaaaaaaaaaaaaaaaaaaaaaagtcaattctatggaatgtcatctctggaaggtggctgtggttagcagagatggccagatagtagggccacaaccctggggcttttacacccaccctgacacagaggaaagagtcacccatagcacagaccagttggatgatagaatggcatatgacggtcatggtggtgcgtgcctgtaatcccagctacttgggaggctgaggcaggagaatcacttgaacctgggaggcggaggttgaggttgcagtgagctgagattgcaccattgcactccagcctgggcgacagagcgaaactccgcctcaaaaagaaagaaagaaagaaagaaagaaagaaagaatggcatatgactgccagctcagtgagagcagctgcaggtgaaaaggagaggcacgtgctgccttcaggtgtcttcaacaacaccctcctcccacattccctgcattcttatttccatgctactctggaggaaagcatggtaataaatactataatacgtggccctgcccatcttatttatgaaggatacattttaccaaactgaataaggggggctcaaaaactgacatgaacaaacagatatgtgtatgcccaggtccatggcagcattagtcacaatagccagaggtgggccaggcatggtgactcacacctgtcatctcaacactaggaggccaaggcaggaggctagcttgagccctggagttcagcctgggcgacatatcgagacacacagacacacacacacacattttttttttcttttattagctgggtgtggtggtgagtgtctgtagtcccagacatttgggaggctgaagcgggaggatggcttgagcccaggagttcaaagctgcagtaagctatgatcacaccactgcactccagcctgggcaacagagtgagaccttgtcttaaaaaaaatttttttaattgaaaaaattacagtagccagaggtgaaaactacccaaatatctatcacagatgaatgggtaaacaaaatgtggtatgtgcatacaatggaatattattcagccctaaaaaaggaaggaaattctgacttgtgctacaacatagatgaaccttaaggacattacactagtgaaataagctagtcataaaagggcaaatattgcatgattccacttaacctgaggtactgtagaatagtcaaattcatggagaaagcagaatagaggttacagggaccaggaaataggaagaagggggtagttactctttcatgggcatagtttctatttgagatgataaaaagttctgaaggtggatggtggtgatggttgcacaacaatgtgaatgtacctaatgccactgaactgtgcactgaaaaaggatcaagatggtcaatgttatgtatattttacatttaaaaaaaaaaagtcaggcgcagtggctcacacctgtaatcccaacactttgggaggctaaggtgggcagatcacttgaggtcaggagttcaagatcagcctggccaacatggtgaaaccctgtctctactaaaaatacaaaaattagccaagcctggtggccatgcctgtaatcccagctactcaggaggctgaggcaggagaatcacttgaacccaggaggcagaggttgcagagagctgagatcgcaccactgcattccagcctgcatgacagagcgagaccccatctcaaaaaataaaaaaatttaaaaactcccatgaaataaacttctacaccaagaagacaagatcataaggaacctctcctcctctcaaagttgtactggtacaaatcagagcacagattttcttttaattcttacaatctttgtagcctgatgaacttcacacacttggagtccttactgtaacaaaagttctggaggttgctgggtgcagtggcacatgcctgtattcccaactactcgggagactaaggcgagaatcacttgagcttaggagttcgagaccagcctgggtaatatcttgagaccctgcctctaaatgaaaaaaacaaaaacaacaacaaaaaactggaggttgatacagcagctactagtgcctgacttagaggactcacactttaatttttcaatataaagataggggcattatttcccagcatgaaatgtacaaaacctacccatctccccaagtgagtaaatatttaaaccacccaagccaaagggttacctatgctgttgtttgtttgtttgtttgtttgtttttgagacagagtctcgctctgtcaccaggctagagtgcagtggtgcaatctcagctcactgcaacctccgcctcccggattcaagcgattctcctgcctcagcctctggagtagctgagactacaggcgtgtgccaccagggtttcaccatgttggccaggatggtctcgatctcttgacctcatgatctgcctgccttgtcttcccaaagtgctgggattacaggtgttagctatgttcttatagaaaatgttaagtgttccttctggatctacagatcatgcacagaaatctcagaggatcatgtcagtaactcactaagttccaggaagagaaaataaggatgtgtacatgaatcacaccacactctataaaataaatagtgcatccaatccatggaagcttccctgaacagcaagaatatacattctgatactaagtgaaggacagtatttggtgcctgagggtttccaaagaggattttctagtgcaactcaatttcaataaaggttagaaaactgttttcaaaagccacctgcactaaatcaaacaaaccgcaactccagtagaacaaaagccactcagcaacaaagtaacaaagccataaatgacagccctgtcaataaagaccaagctactagccaaaggtcaggctccacagtactcattgcagaagtgccaggcttctcaatcacgctgtgggggatggtggccttcgccactgaaaggctgcccaggaacagaggtgaccctcccctccaggagtcaatgtcagactgagagctggtttcccactccatccccaccacagcttccaggcccatttgtcacctattaaatgcaaatatactagattgaaagactgataaagaacacagatcttcagagtggaagtggcctgggctatcccccaggacctaaagaaaccatccctccatgcaaagagggacaaggtcccaagcaggaagagagcagacacctgatctgctttctttctttcttttttttttttttttttttttgagatggagtctcactctgtcgcccaggctggagtacaatggcaaggtctcagctcactacaacctcacctcccaggctcaagcaattctcctgcctcagcctcctgagtagctgggactacgggcgcatgccaccacacctggctaatttttgtatttttaataaagatgaggtttcactatgtgggcaggctggtcttgaactcctgatctcgtgatccacccgccttggtttcccaaagtgttgggattacaggcatgagccaccacgccaggcctctgatctgctttctcaccaaagaagaaacccaactcaggccctctgtgaaccccacagacttccatgaagcagagaggtaattcccccagcatagtctaaagatgaatgaatgaaaggagctataccaaggttctctgtcattagcaacgcctacccaggatccacaactaagaaaaccacacagggagcaatgagcctttcaagaagccacagggttcagaaactgttgagttttaaacaggtagtaattaaaaaacaaaacaaacaaacaaaaaaaccaggagtgtgggtcagaaatggtggttcacacctataatcccagcatattgggaggcccaggcaggagaactgcttgagcctaagcgttcaggagaagcctgggcaacatagtgagaccctgtctctacaaaaaaaaaaatagaaaaaagaaaaaaagaaaaaaaatagctgggtactatggcacacctgtggtcccagccacttgagagcctgaggtgggagaatcacctgagcccaagaggtcaaggttgcagcaagccatgttcatgcctctcccctccagcctgggtgacagagcaagaccctgtctaaaataaataaataaataaagttaaaaatagaaaaacaggagcgtggaggatgagggagagaaaagaccaactgatgtgatgggtaaagggggctcaggagcattccacgggcttctactgtgcaggaagaggtagcaggtgagacagcaaccaggccccctcacgagttctcctgcaaggttaagaggcaaatgagcactctggtcctctgagccaccagggcttaagaacaacagtgtagatcggagacttagaaccttgcccctgctctggggaactctatctttccagtgcctggtgcaaatgggcactgatgtttgctaaataaatactaacttgtagaatgattcctgtttcctacatagcccaggagaaaggcaatggctgggtgagtgatatttacaaagtcatagcaacaacacaacaatgtattaacgactaccttttactgaactgtgtgctaagtcctctacctaagctatctcatttggaactcatcacacagccttgtgaggccatactattattatcccatttacagatgaggaaactgaagcctagagaggcaaggtaacttgccctaggttatgcacctaggaagctatgaggcctgcgttccaacccaggtcaaaagactccaaggctggcaacctctgtttcactgctgcctctggactgcttgcagggaccagttatgaaacatatttctcattgtggaagggttgggcaacaatttatttaaaagtgcagtgcatttataagtatcaaagaaagtaccaatatggccttaaagattcagatgataaaaagttatctgttttttaagaaaatgaggccgggtgcggtggctcacgcctataatcccagcactttgggaggccactttggtggattgcttgaggccaggagtttgagactagcctggccaacatggtgaaacccgtctctactaaaaatacaaaaattagctgagcatggtggcacacgcctgtgatctcagttactcgggaggctgagacacgagaattgcttgaaccagcgaagaggaggttgcagtgagattacaccacttgcactccagtctgggcgacagagcaagactctgtctcaaaaaaaaaaaaaaaaagaaaatgagaaacaagactaatatatacatatacacacgtatatagacatgctcatatctatatacatacatgcacatatatatgctttcagaatcttcctaaacaataccaggtcttcagtgatagaggacctcaaaagatcttagattaggtattacttttagctgggcatgggaatggggattcaggagtaacttggttaacaaaatgaaaaatataacctgtcttctttttatggtattaacactcttctggcagcaaattaattttttacttaataagaaacaaaaaacctacaggcatgaatacaattaatctaactgaatgtcaacagacctgaaaactcacaagatacctaaagacaccactaagaaaaactttccaggagactaaactagaaccaagtgtacaaataaactctaaaattaagtgcttaagcaatttaaaaggcatctctttttagagagatttgggacataaattgttctggggccaggcacagtggctcacacctgtaatcccagcactttgggaggccaaggcaggaggattgcttgaggccaggagttttagatcagcctgggcaacataacaaggccctgtctctatgtattttatttataaaaaattttaaaaaacaacttgttctggtacctaaaaagcaagttcctctgcattcatgagtgcatcggtttctttttcagtaaccgacactaaagagcaaaggtaactaggaaaaatctctctggagttgttagaattacctgcattctgtgaatgttgcttataaaaaactaaaatggaattttaattcataaggcaataaaatcttaaaaatataccagatacctgcaataatagtatttttagatatcaatctaataaagaaagtaagaaaccaacattcaaacactgactatatataaagaacattcatatgttctctgatttaattctttcaacaatccaaagagattgataatatcttttcccctcaacagagcagcaaacagaggttcagaaaacaagaattcatttaaggttatacaattaataaggaaaagaactgaaatctgtgggcatttttatattttccactactccttgcttcaaaaggatggaaaagaaagaggaaagaggaatggacggaaggaaaggaaaagaacattctacagccagatctggtagtgactccattagcactaagatcccctagactgaaaatcagattaaacataaaatcagtcctgaacttgccttaccaccgaagacttctttttgcgaagccatttgctgtaccacattattatttttaaacttctattgaacaaaaaacaaaacaaaacctctcccagttctatcactaggatgtaataacatgtgcacacaggtgtgtgtgttccttaaaatccataaggaaaacttgaaagcagccagagctgacctcacacaggtggcatctgtgttggacagtaataaccaaaagagtcttgctcggcccttaataacccacgcaaagaatcactaaaagttactaaaatacagccactggaaaacgacgaatgaacaaagtggttaatgttccttcccaaaattatagcaaggaaaactccaccacctaatgaaaatcattaagagaattcagaggagttaactgcaggcaggcgtgacttctcccccagaaagtaatcagctaataagcattaatcatcttgtgcacagtctgcgcatttataatagggtttaataaagccttcaacaacaggcccagaattaatgaacggcatcttaggtctaacacaaaagtattccttagcggacgaaaattagcgcttctacttcacatttgctgtcgtgtcccccatatatacgggctcgtattcactatccctggaggctttatcacgcgtggttttttttagcttttgttcctgaaagcagttaaccttcatcgataacctaccgtgtgccgggtgatctccaaacatcccactagttttttctttttttagtttcccatgggtagtggcaaaattttgaaggcaatgcaaccaggaagatgggagcgaatattttctcacgccaacagggaggccagtttccgggagaggaactcggcggcgtctggagctacccaggaagagcttgcagcccccaagggcagcgcgtgcaggccaagggggtcgggtagggttgagcgggtactcaccgggcagaagcgcggcccaagtcctccttacttctgcgtgtcaatcccccttccccaatttgcatccttactgcaatccagtctcccccgtacaaccgtcacggatctgcgctccgagcaccgcccccccccgcaaccagccaccaacccccggcagggaccacaggcacacgcctccgtcggaaaagttgggcagacacttcagaacttttctttcactttggggagaaggagggagttggagaagtgggggcgaggggtgttaaagcactgggccattctctgcaacatctccccgcgccccccaacaagttgcccctcctcgtgcacacagcgaggtgacagcgcagggcaccaaactgctgagggaaggagatgcctgcagccatctcagcggggctggcggacgcgacccgacagtcaccggaaaaacagtggtgtcggtcttccccatcacctcccctccccatcccacaataaagcgcacggaagatgtctgggagtacctggccctgccacaggagctggggaggagagcgatctcaccccctccatccctcccggcaggtgggccgcggtcagatacgtttggcccgcaagtccttttcggacacgttggcatctgctcccaaagagcgccccagcaggacccggtcaccggggtcttccagaggggcggtagccaccgcacaggagccagcggcatcccccaaggagccgcaagccctacctggcttaacccccggacatgtgtgtcgctaccgatcgaagaacccaaacaccccgagatttccctcctctaggcaggtgaaaaccccacggaactctccgcagcgctgcctgcccagccggccgtgtctcgccgtccccgaggcctcgggggctcccagcacctccacccaaatcccacctgtgcgggctcgggagtccgagggcgctgacagctgctgccgccgcatcccggatctccaaagtgcggcgggagcggccagggaacctgcaggacaccgccgggccaaggggcttgggaaggtctgggggcccccggcgccgcacccctgcttacctggcgttcgctgggccccggctggggcatccgcctggtgcgcgccgctcggagcgctcgctgcgcacctggccgctgccgccgcccgcccggccccagccctggccgccgcgctagcgctgcatggcgcacgggggctggccgggggcccggggaagcgtgtctagttggcggcggcacctccggctctcgcggctcgctagtggctcccccgcctttccccgccccgcgtccgtgcacccttcctctgcagccgcccttttgcctccgctccgccggaccggccaaactggtttctccgctcggggaggtgcctctggtttccctccagcagccgcggccgccgagcctcgctggggctggggctggggctggaggcgggctcggccttctcccctccctttttccctccctagggcggagaggggctggactgcaagccccggggcggcccgaggcggcccaggtccagctcctgccccacgccctccgtgcgtcctggagtcaggtgggcacccctttcagtcttccgagcccagcctacgagcccttgcctcgcccagcctgagacccagttgctgcggctgctcttagctccccgggggccgcactcgccaccacacctctccagcccagcgtcactttcccgctgcccttggctggcttggccgtcaccccgggtcgaggactgagccagcctggaaagctggcggggccgcggcgcgcccgggacctgagctccctcggtaaggggagctgtgtcctcttgatgccaagtcatgtttggggaccggtcaccgaatgcgcgtcaaagttcgccgcgtggagggtgaagaaagaggctgcgcctcaagacttccagaaacgtatcctgtgattgcagccagcaggctttctgccgagtccaaacgctatcgagtttttttgggtttggagtcaaaaggagttaaggtgcggcccgtgaaccacgcggtgtaggtggaaattttggactcagcgcctcgttgctggctggtgtctgagcgggtgaatcgtgcctccctggcagtatagacattaccctccttcttgagtagacttttgccgctccccgactatggaccgagtcgttgggataagaatggaggaaaatcaaagatcagagtttgcttaaaatgcagtaggggagccaggactcccacacgattcccagtcacctagaggctcacatctatgcccaagagtccagactcccaactgggtcatcacagaggcttcctacaggaggccgtgcttgatgggactcaaagatccacagctttaaggatcagagttgtgtagagagggtattcaacgggtggccaactggtagaatcttgtctgataccaaccccgaggctgctctaggcttctttttcatgagtcaaacttgatctctgactaggtgctggtcagtcactcaatctatccaggcctcagtttcctcatttgtaaaatgagattggaccagatggtctcttccagcacttatattctgaagctaacgacagaacaaaggtaccgatgcaagagaacatagggcctgttggtgacactggttgatctaagacatttagacttgtttttggtagcacctgcaaaccgttgacaatttaggaccgagcatgagcatgatcaaggttgtgttttagggaaaataatagggagatagtctagagaggataaaactgaagatgggagaatcacttgagaggctgggacagcgacatacggaggagttgccaggggaagtaaaaaggaggaaattcaagggacaccacagaagagagatagggcacgaagtggccacaacctgcaactgactgggagaggggagcaatggaaggtgagccaggttctcaagactgggttatggcatgcaaggagcagcagactccaaaggagggaagccgtttaggaagactctgcccctatctggataaatgccagcaaacctaggaatcaagaggggattccagactaaagggggcaccccctccttgcagatccactaccaagtgctcaacctgtccaagaaaatgttacatagaagagactaaacaaggacgcatccaatctacacctgtacctagatctgatcaataccattctgatgtctgcatttatttacttgtttatttatttatagagacagggttgggtttcactatgttgcccaggcttgtcttgaactccccagttcaagcggtccacctgcctcagccccccaaggtgctgggattacagtcatgagccaccacctgtactaaaaatacaaaaattagccaagcatggtggcgggcgcctgtggtcccagctactcaagaggctgaagcaggagaatcaattgaacctgggagactgaggtggcaggcagtgagccgagactgtgccactgcgcttcagcctgggcaacagagcgaggctctgtctcaaaataaaataatattctttcattcaacaaagatttgagtgtgagtgcctactgtgtgtcaggcagttttctagttgcttgggtacatctatgagccaatcaaatatctttttttttttttttttttagacagaggctcgctctgttgcacaggctggagtgcagtggtgtgatctcggctcactgcaacctccacctcctgggttccagcaattctcctgccgcagcctcccgagtagctggggttacaggcacagccaccaggccaggctaatttttgtatttttagtagagacaggtttcaccatgttggtcaggctggtcgtgaactcgtgacctcatgatccacccacctcagcctcccaaagtgctgggattataggcgtgagccactgcactcggcaagtatcttaaaaggtggcaaatgctttgaaaaaatagaacaggctggactgggagaaggcccctgaaggagctgccttttggagtgctgtaaaagttatatttcttgatctgaatgataattatacgagtagacgcatatgcaagaattcattgacctgtatgcttaagatttatacattaaaaaataatagaccaggcacgatggctcacacctgtaatcccagcactttgggagatcaaggcaggtggatcatgaggtcaggagttcaagatcagcatggccaagatggtgaaaccctgtctctactaaaaatacaaaaaattagccaggcgtgatggtgggcatctgtaatcccagctactgaggaggctgaggcagataattgcttgaaccctgaaggcagaggttgcagtgagctgagattgccccactgcactccagcctgggcaacagagcgaataataatactactactaataataattgagcaggattaagagattaggatttggaggatgagtcacaattttaaataatgtggtcagggtaggcttcttgaaaagctgcatttgaaaaatgacttgcaagaaggtagagtttcatctttgatgagacaaatcctttgaaaacccattttgcatggaacccaccagatggaggcatgttaaaaccttatcctaggcgcagtgcctcacgcctataatcccagcactttgcgaggctgaggccagtggattgctcgagcctaggagttcgagaccagcctgggaaacatggtgaaatcccatctctacaaaaaatacaaaataaaattagctgggtgtggtggcccgcacctgtagtcccagctactcaggaggctggggtgggaggatcctttgagcccaggaagtgaaggctgcagtgagctgtgattgcaccactgcactcaagcctgggtgacagggcaagacactgtctccaaaaaaaaaattaaaaaaaaaaacaaaaccaaaacaaaacacccacacccacacaactccacaaccttatcctagaacacttcccctatgtaagtcttcctcatcttaggaaggaggttctcagagtgcatcagctggtgttgctgatgaaggaattagctcacctggaaaccgaccttgtcctttctgaaagaaccatgccaaattttggggtgccttgtcagggcaatcactggaagtgtctcacatgcaacaattttaaaatgcatcttacatgagtcactgagagatgacttctttgtcctggcagagccctgattccaccagccttggcagccctttctcagcattctcagatgggattgaataaacactctggttttatttagaagtcactctcatttagtaaccaacgagctgctgggggaaatcacgaaatgtaacagaaatggccatttctttttatgttttattttttattatttttttgagacagggtctcactctggcacccaggccagagtgcagtggtgaccattgctcactgcagccattgtgcccagaaatagccatttctaaaagagggtaacaatgattttcaacttttgtagttcataatttcctctgtttcttttttccccccttttcttggcagcagtcttatgtacatttgcatgatgtgggtaggaaagccagggaggttgccaagagagctagctcagttttactgaaaatttatttcctggaatttttttttttacaagataagataagtgataaaagatatgtttaaatggaggtgatactgcttgtattcagttctttgctaagcccagtggtcgtttaagctaaagcatttaatgccaatggaaagactcatgctgcactaggtgctattgtaacccatgcttggcagtcaagattaactcagttgaaagttcttcacagtcattatccagaccagatccagaattttaaatctgataagacacctcttatgtgaatctgtcctagcaataagtgacattagaattttcaaatatctgccccacatccttcgaaatggcttttaaaacaacaaatacagatgatatattctattttctctggcacaatgagttttccaacattccttctaagttacaaggctttccacttcctttactacttaatgacttctttttttctgactaacattttaaaataagaaattagattgcaaaagaaatattaaacatcaagtaactaaatgtgtctcaatgattttggcaatcacacagacttaacatgcataaaatgttacaggaggaattattcatgttattaaaattcacttccctttcttttgtattcataagcatgcaaatgtgtaggattgtctaccattcttttctacaaggaagagattttaataaaccacttactgtatttctctatggaaatgtaataaacattacctgatgttgataatgtaacaccagttaaacttaatgagtaaaattaatacagacagttcatgaataattttccaaaataacttgcgattgttgttagtatatgtcgccatgtgttcctgtagttgtaggaagtttgtatgtattatcttaggctctgttctcatcattttccattgtgtcatgaaaacacatttaccttttggactttatccctcttccttcctgacctgcaccctaaatgtggctaattccaggttgctgtgaatagaagtttactagattttttttttttttttgagacagtctcactctgtcgacaggctggagtgcagtggcgcgatctcagcttgctgcaatctccacctcccaggctcaagtgattctcctgcctcagcctcccaagtagctgggattacaggcacgcacaactacgcccagctagtttttgtatttttttgtagagatggggtttcaccatgttggccaggctggtctcgaactcctgacctgaagtggtctgccctcctcagcctcccaaagtgttgagattacaggcatgagccactgctcctggctgaaatttactagattctgaagagcacgtgctactcctcctgtttgaaatgccctacctcatgtgcctgatctcatcatccttcacatctcagttcccaagtggcttcctctgggaaagctttgccctagtctccctcaaactaactaaagcttctaacatttagttggttcttgctgtttccacagcattttgcagctgacttctagggaaagcttcccattgtattttcactgtttacctgtcttgttcctcactgcactgtgagcccattgagacataaaactgagtcttattcttcttgatctcttttggcatacagcattaaatagagcattccaggtgcttattaattcttatagaatgaatgaatggttggcatggtcataattctcaatagttgcatagtattttctcctgctgatgatttctttaatcacttgctattcttggatgtttatgcatttaccaaattggtttccagaaatatctcatttatcacaacccaccactatgttaagggcttctgaaggtcatatttctatctggttcctgttattttgcaggctgtaatctgtccctctgtatttcattctagaaacagtgtgcctcagtatacaaaaaatttttgtcttgttagaactaggatatgagtaagcctttgttgctatcactggatgataaaaagaaggttattcaaattcttccataaaatcacaggagtgtaccttgtgtatgaacacagccttctgtgttttcctaaatttccagtgagcgtgagtggttgtccctcccagttaaagaaaagcaaattaaatgcaaaataaaacaatgagaaacaattttgtacttatcacattagcaaagttttttttttttaagtctggtgttgcaaacactggcaacatttaggaggaaacaggcactcatacactgtaggtaggggtacaaattgtgcaacttctttgaaaggaaattcagaactatatcaaaattttaagatacatgccatgtgccccaagaatttatgtctaggaatttatcttagagatacacttgaacattttatacaagggtaaatgtacacatatattcatggctgcatgccttttctgcaaaagaccaaaagtgacctcagtgtccattcacagaggttacttccatacaataaaatactaatctgccatttttaaaaaaattaaggaattctagtttatttctgtatacataaataaaattcatgtgtataatgtttataggtttccatttgtgtaacatataatataatgtaataaataatataatgtataatctaaattataatgtatattatgtatacaatataatgtatacataatctaaattataatgtatattatgtatacaatataatgtatattgtatgcatataatataatgtatatgtatataatgtaatatgtaactgttatatattctcatatgtgtaatatatgctaatatatgtcatatattacacatacatatatgtatatatagactgaaaatatacacaagaagttggtaatggtgctcatctctatgatgggagactaattttcacatatatgtttgtatagttgaaactattttattgtatttttccctgcttttcttgactgtagaaactttgtttttttaacatatttctggatgattttttaatttaatttttttggcaaaaaatacgcatacaaacacacatatatatattttaaactcaaatagtactgcaaagtttctaagggaagacaacagtcttgtcattcccctcttttctcaggctcaaatgctactctccagaagcactcattttaaattttagttgttcttacattcactttcttttgttttctttttttttgagacggagtctcgctcttttgtccaggctggagtgcagtggcgtgatcttggctcactgcaagctccacctcccaggttcaagcgattctcctgcctcagcctctggagtagcttggactacaggagcccgtcaccgcgcctggctaatttttgtatttttagtagagacgggttttcaccatcttagtcaggctggtctcaaactcctgacctgtgatccacctgccttggcctcccaaagtgctgggaatacaggcgtgggccaccgcgccgcggcacatttcattttctttcccggcctcccccagatggagtctcgctgtgttacccaagcaggagtgtacagtggcgtgatctcagtccactgcaacttccgtccaccaggttcaagcaattctcctgcctcagcctcctgagcagctgggattacaggcgaccaccaccatgcccagctaatttttatattttttagtagaggcggtgtttcaccatgttggccaggctcattcactttcatattactaataacaagcttgtttggccatgtcttgatgttttccccttttagacattatctactgaattcctatcagagaggcagatttaactggcttacacatcccactcctgacaccctcccatacaaactcttgctcttactccaatctcaaatcataattagattgcaacttatagccaaatcaattttcagtggacaccttattatgactatggaaatactgtttgcagttaagccatgcagtatagtaacattgcacttcctttctcataaagttttttggatttgtgttgagttaataattgcctttccccctcatttactttgtcttccatgtgcctatcattaattcagttccaaaatgtctcacataaccataaagcacctctcagtatggccagacacaaaattcaactgtttgcatttttttcccatgagacattcccggctgtggactctgtcctcttgctttacgatgaaatgatcactgtcatcatcctgagaattccttttttgttgtacttgctagttctggtggagcacatctgaaaaagagaacactagagaaaacttttttgaggcctaaggtatcacctaggatgccttcaattataaataatagcattctggaatacaaataggatttttattactattattaggtcatctctaactctctgaatagttagcagctcaatgatgtcatcaggacccaggcactttttgtacccttgctgtgccttcatcacaacaatgatgatgtgtccgctttatgtcacaggtggctacagcagctggctaatttcatttgtcagaaactgagtcataccttagctgcacggaagtctcagaaaatgaatatatatcatttacatcttctattgtgagaacaggtctcaagtcaataggaaagaagggattgggggaatagctgttggataggcaacccacagggtctgcacatcatgtgtatttaaaaatgtgtttagtctgcattcatagtttagctgggtatagcattctaggttggaatgcattttttttccttagaattttgaaggccttgtttcaatatatcctagattccagtgttgctgtcagatgcttgatattattctgattctcaatcctttgtatgtaaccagctttccactttctggaagcttttcctctgattctaaaatatcactgtagtgtgccttagtgtaggcatgcattcctttttctttttctctttttttttttttaagatggagtttcacccttgtcacccaggctggagtgcagtggcacaatctcagcttactgcaacctctgcctcccaggttcaagtggttctcctgcctcagcctcccgagtagctgggactacatgcacacaccaccatgcccggctattttttgcatttttagtagagatggggtttcaccatattggccaagctggtcttgaactcctgacctcaggtgatctgctcgccttggcctcccaaagtgatgggattataggcgtgagccaccgtgcccggcctactttctcaatcaaaaagtaatgcagttttttaggatgcatttttttaaaaacagcaacaaaaatatttgaatttggattatctttctcagttacacttacttttatccaactgcaattgacctggggtaagcttggcaacaatgaaacatcttttccaggctattccctttggagtctttcttgttctctggatccctagacttctcttcccaccacttgatgccttgcccaacctatcctcttcacattttctttacaattaaaactgacctaaaaccattgcttaccttttagagctaacgtagctaatctaataaattaattcacaaaatacaatgatgaaccctccttacacaaaacatataggcatttaatcacaatcttcaatatttttatcccaaatgaaagagtaaaaggtgggaatttcacagcggttgatgatgattaactgatccatattttctgtccttcaaatcatattccctaatccagttcctaacagttctgaaacaatgcagaagaaaatcttggctttttaaggaatgcttcattggatagcaatttaaaaatgcacttgtattcaaatctaaacaatccatgacatctgtggggcacctgatcaagaattgctcacattccatcttgtgagtcaaagcacaggattgctgtgcttctctgagtcccagcactgaagacctacacaggcatctttcctatgactcacctaaaatacttaatttctcaaagatgtagacaatcaaatgctggcaggtgattctgtaggctaaactgtctggtcctcagctgtgctgagtgacagtgatatgcataatggtagtttttaaacttttttatactgaactttcagttgttgttttctttaactctaacacctcaaaacaggagagtcatgtgtaaaacaggagggactggggcagctgacatgattggcacaatggatggcccctgtgtcaggtttaccataaagctaatgatacttaaacttcagggactctccaaagtcttatgcctcattttacattattaatttggtaaaaaaaaattttttttgagacagaatctcactctgttgcccagggtggagtgcggtagtgtgatcttggctcactgcaacctccacctcctgggttgtagtgattctcctgcctcagtctcccaagtatcttggactacaggcacaagccaccatgcctggctaatttattttagtagagacagggtttcaccatgttggccaggctggtctcaaactccggacctcaggtgatccatccaccttggcctcccaaagtgctgggattacaggcatgagccaccacgcctggtcaaattttgtaattttttttttcttaaagaactctcctcttcctcagttgtataaacttcaggccccatgaaacctggtttcacacctgataggacccagagcttcacccctccttcctctcctcttcagccctctccaaggagccctagtcctctgtggaacaaaaataaaagacaacctgtgactgggcacagtggctcatgcctacagtcccagcacttttggaggctcaggcaggaggatcacttgaggtcaggagttcaagagcagcctgggcaacatagtgataccctgtctgtacaaaaaaaatttaattgggcatggtggcatgtgcctgtagtagtcccagctatttgggaggttgaagcaggaggattgcttgagcctaaaaggtcaagtctgcaatgggctttgatggtgccactagcctgggcaacagagtaagacactgtcaaaaggaaagggaaggagaggggaggggaggggagaggaaaggaagggagggaagggggaaaggaaagaaaggagaaagaaagaaaacaacaacttgtaacaattcctggactaggaatcaggagagagggtctgacacctgtgcttgctactagccctttgtggtcctcagtcaggtcacttggcctttttcagactccgtttcatcatctgtaaaatgggtgtgtttgacctgatgatcgccaagctccctttgaaaactaagtctttgattctaagtctactggggacactttctacattcccttacaatagcctctattcatgggtttgtctttccccactgaggtgctggaaaaactcaccctctgattttctgggtcctgccaagacttagcccagcccctccctcttcaagcaatgacgtccgtgatggtgataggactgctgtctctcctctccccacaattcactgtctccactcctgctagatgaaagaggaatgacagggtgcagttctatgtgttaacccttctcagaataccttcatttaaaatagaaattaatatttcatctcaatggcataactctttagtggtgaaattttaggcagcagttgcagtcaagtctgaggaagagagatcgtcttgagctcttgcagcaggcagtgtttagaccccctcaagccacaaggggacactgcccattattctagaaccaaaagactgacccagttaaaaggcacaggagccctgtcaacgtgggtgcaaggagactttcacttggaatatcatttacactcacacagcagtggaagttaattgcatggtggaggatggggacttcacctgcttcaccatccatactccactttcccccagtcacagatcctgatattatttgggggcagcagcatgcccagctaaaggaccatgtgtcccagtctcccttcagcgtcatgtggtcatgtgataaggttctgacccatgaggtgtaggcagaatgttacatgagacttccaaaaactccctgaaagtccagaaacacacccttttctttagtcttcaagtcagagatgtgatgatgatggctgctaagtggttgccatcttggatctgaggggactttgcagatggaagtcatttactgaggagggtggaccagaaacataaaaagagcgtggctccctgatgacatcgtggtgccacttcctcagcccagaccacccccactctggacttatttttagtaagaaaataaaatctttatgtgtttaagccactagctctcagttcactgtcactcatagctgaatatattcctggctgaaataaatgagaagactaaactttccaccttttaaagaaagaatatagtgagtaaaaaacagggtaagatctaggagagatgcaaataaccttaaaactcaaccttcctcagcagaaggatataatatatatataatatatataacataaaacataacatatatgttacacatataacatatatgttacacatataacatatatgttacatatatcatatatttatatatataacaaggatacattcatttaaagcccgaatctcaaaagttcagacaatgtattgaaagggaaaataaaacaaaagcactttagtatgagcattggcgattcctgttggtcccccacagggtagaagatgagaggttggtcagtcaggaagtgtcacctctgtgcacaacctggagttgttttggaaggaggagagacgcccagagcttgagcaatgcaagcgtgatccctgctctagggaagcgtgaggtcatctgcacatgctcattcatgctcgctttgctccccgcagtagggactcctagcacctccctcagacccatctttgttttggctgctgtggccataagatctgcacaagcctctgtcacagtgctgaggatagaactggtgagcaagccccagtgctggccctggaggagatgagagctcagtgagccgagagcaaggaaacaagccatcaatccctggtaggacaagtgttcacaagggggaaggcccgtgagaagactgaggaggggccctgactcatttttggaagtcccaggaggcttcttggagaaggtgaccttctccaagaatagagacctggaggatgagcaggagtttctgtcctccccttagtcactgttcagtggcagctgctgtcacatgacagttctttgccccagatccatagagtgaagtaggtagcaatgaggtagttagaagaatacactgctgggctgggcatgttggtgcacgcctataatctcagcactttgggaggccaaggcaggcagatcacctgaggttgggagttcgagaccagcctggccaatatggcgaaaccccatctctactaaaaaatacaaaaacagtcagccaggcatggtggcacatgcctataatcccagctactcgggaggctgaggcaggagaatcacttgaagctgggaggtgggggtcagagtgagccaagatcacgccattgccctccagcctgggtgacagagcgagactctgtctcaaaaaaaagaattagttaattaattaattaattaatttaaaaaaaaagaatacactgtcctctcttttcctttcctggaagtctgaagacagaaccatctcatttgctctggaaggagtcagggccaacatcagggagtgggattaagggccagggaggatgctgagttaggaaatacccacctcaccaccctgggggtcaggcccactggactattcaggcagtgagcagcagtacccatgaccatgagccttcttctcacactcttctccccatgtgacttattttggtaacagtttcattgagatataatttattccttcccgtaggacatagctaaaaaaagagagaaagaggtaatttatataccacacaattcacctatctaaaatgtgcaattcaatggattttagtatattcgtagggttgctcaatgatcaccacaatcaattttaaaacattttcatcgcttcaggaggaaaccccataccctttggctgtcacccctcaatttccccaaccctggcaaccactgatttcctttatctcaatagtttttgcctattcttaacatctcatagaaatggaatcacttacatggtcctttgtcactgtcactgatgtcttccacgcagcagaatgtttttggggctcattcaagctgtgcacactccttcattcctggttatagccaaattatacacacaccacttttcctgtgtctcagactgatgtctgggtcagtcatcaatcctattcgtcaatttattctccaaatgcgtctagagcaaataccatgtgaaacccatggttttatggcccccaaagctcccaatccatcttcttgtctccatctctatcatcaccatcccggtctgccaccgtctgtctctgggaccaaggagctttccaaaagtgaaatgttagccttcaacagtgactgcccgcccccaaggacttcccgtgatcttagaataaagacaaagctacctggcatggctatcaacactctgcccagtctggcacttccctccactctgtttcaacttctctcttttggcttcagctatcctgtcttctctcaaacactgtcacttgccaccttgaggccttggcctggaacaggccttatcgctcacctggttaaggccagtttaccttccaggctgcaggtcagtggtctcttccaggagaaacctttgccaaaggagcctcatcatagctctcataattctcatatcactctgttcctttcccactctgtctcccttctacactggaagctctttgagggtgggcattgtctacttatgctcatcattggtttccctctacctaacagtgcctggattagaaatacagaaaggacatccataccaacatttatagtgtgccctgtaaccagacacttttattgattaatttttttagttttttaaaattttattttaaattccaggatacatgtgcaggacgtgcaggtttgttacataggtaaatgtgtgccatggtggtttgctgcacctgttaacgcatcacttaggtattaagcccagcatgcattcgctatttaccatgatgatctccttcctcctgcccccccaccccaagccccagcactgctgccccaccaccaggccctggtgtgtgttgttcccctctgtgtccatgtgttctctttattcagctcccacttataagtgagaacacccagtgtttggttttctgttcctgcgttagtttgctgaggataatggcttccagctccatccatgtccctgcaaaggacatgatctcgttcctttttatggctgcatagtattccatggtgtatatgtaccacattttctttatccagtctatcattgatgggcatttgggttgattccatgtctttgctattgtgaatagtgctgcagtgaacatatgcacacatgtatctttataatagaatgatttatattccttttggtatatacccagtaatgggattgctgggtcaaatggtatttctagttctaagtctttgaggactcaccacactgtcttccacaatggttgaactaatttacttccccaccaagaatacaaaagtgttcctatctctccacagcctcgccagcatctgttgtttcttgatttgttaacaattaccattctgactggtgtgagatggtatctcattgtggttttcttttgcgtttctctaatggtcagtgatgttgagctgtttttcatgtgtttgttggttgcataaatgtctttttttgaaaattgaccagacacttttataaagactatcttgtgtcatcgttatgataatcctatgtggaagttatcttcagcttcattttaccaatgagataaatgaaactgtggtagtataaataaataacttgtctaaagatactgagtagcagaggaagcattccatcccagacccattgaattctcagatctaagatcctgccaggctgtttctggaatacagagcagaaaattccctcctgttcaagcgctaactagataagtccttcttcacaaatgccaagtaagcacagaaaaagagcaacagggaaaaagtttatgctccaaggaagaagtcaaccccagactgcagggatcgtggtgagattgtatcaggattggaccttggggaaagcttccttatatttgagactcataaaaaaaaaaaaaaaactccccacaggtggtcagtttggttcttactggcttgctggaagtaagttctcatgtttctaaatgcagaccgggtatttcctttggaatgttctcacattgttttatttttgggtgtcaaccttttcattttagtccagcaaagaactccttgttcgtttcctttgggggatttatttttcctcctttttctgaggcggcagtacctctaccaggaaaaactgattaccagtgctgtccccagagttgtcactgaggtgtttccaccgaaagcttctctgtcactttgaggtcacctgagagcatgagagccaggctcactggtgacctcatccctctggccctattccagcagcttagctttgagcttcatcatcacagtgcagcagctgactacttgctaactaacgtgttatgccattgataaccaggaacttcctgactgacgttgaacgggaaaaggatggcggatcagaacccctagaaggaggtcatcttcatattacaaaggacagcccatttagggaagtgactttggtgttgtttaatagattccctttgctctgaagcaccctgggtatgttcttttataatcaaaacagctgatcacttttcttacagagataaatttgctcaaaaataatgcatctatgtatacaatgaaatattattcagccttaaacaggtaggaaattctgacatgtgaatgaaccttgagaacatgatgctaagtaaaacaagccagtcgcaaaaggataaatactgtacaattccacttttgtgaggtccctagaatagttaaattcatagagacagaatgtagaatggtgtttgccagaggctagagcagaggcccccagcccccaggccacagaccagtaccagtctcactcacattactgcctgagctccgcctcctgtcagatcagctgcagcattagattctcacaggaccacaaaccctactgtgaactgcacaggcaagggatctaggttgttcactccttatgagagtgatgatctgtcactgtctcccatcacccccagatgggaccatctagttgcaggaaaacaagctcagggctcccactgattctacattatggtgagctgtataattatttcattatatattacaatgtaataataatagaaacaaagtgcacaataaatgtaatgcacttgaatcatcccaaaaccatcccccaccctggtttgtggaaaaattgtcctccacaaaaccagtccttggtgccaaaaagactggggactgctgggctagagagaggggttagagggagttcgtgtttaatggggacagagttgttgtttgggaagatgaaaaatttctggaggtggatggtggtgatggttgcacaatcatgattgtacttaatgtcattgaactgtatacttaaaaatggttaagatgaggcccagtgcagtggctcacacctgtaatcccagcactttgggaggccaaggcgaatggatcacctgaggtcaggagttcgagaccagcctggccaacatgatgaaacctcgtctctactaaaaatataaaaattagctgggtgtagtggtgggcgcctgtaatcccagctacttgggagactgaggcaggagcttgaacctgggaagtggagattgcagtgagccaagactgcaccattgcactccaccctgggcaacaagagcaaaactccatctcaaattaaaaaataataataataatggttgtgatggtaaattttgtgttgtgtatattttcccacaataaaaaaataatgtgctgaagatgcttctcaaagtcttgcctgctatcctgctacttgttcatcaattgcaatttggcctgccacctaccttcttgaggcttgttcctcaaagtatggtccctggaccaggagcagcagcagttggaagcttgttagacatgcggcatcttggccagatgcgggggctcatggctgcaatcccagcactttgggaggtcgaggctggcagactgcttgagctcaggagttcaagactagcctgggcaacacagcgaaaccccatctctacaacaaatatatatatatatataaaaattagccagatgtggtggcatgtgcctgtaatcccagctacttaggaggctgaggtgggaagatggcttgagagcaggaggcagagattgcagtgagctgagatcaagccactgcactccaacctgggagacagagccagacgctgtctcaaaagaaggaaggaaggaaggaaagaaagaaagaaatgcaaatgacttaggccaggtgtggtggctcatgccactaattccagcactttgggaggccaaggtgggaagagcatttgaggccaggagtttgagaccagcatggtcaacatggtgaaatgttgtctctactaaaaatatcaaaattagctagatgcggtgatgcacacctataatcccagctactcaggaggctgaggcatgagaatcacttaaaccctggaggcagaagttgcagtgagtcaagattgtgccacggccctccagcctgggtgatagagcaatactctgcctcaaaaaaaaaaaaaatgaaaatgatttatatgcaggttaaggtttgtggagggctgttctggatcagtggtgggcaagtctgcaggcacactggaatcacctgtggagttttaaaattactgatttgattggtttagtgtggccaggcatcaggatttacaactgctcacattagaattcaagtaattctagtgtgcagccaaggttgggatcaacagatctggattatcttttcttctaacccttcagtgttttcacacttttctcatctcagtgaacacttatttcctggggcatcatttctgcttgattctttttaatcatttcaattcctttgttaaatttatctgataagattctgaattcattctctgtgtgatcttgaatttctttgagtttcttcaaaacagctattttcaattatccgtctgaaaggtcacatatttctgtctctccaagattagccccggtgccttatttagtttgtttggtgaggtcactttttcctggatggtcttgatgcttgtgtatgtttgttggtgtctaggcatagaagagttagatatttattgtagtctttgcagtttgggtttctttatattcatcattcttaggaaggctttacaggtattctaaaggacttgggtgttgtgatctacatttgtggtcactgcagctgtatctgcattaggtgctaccccaagcccagtaacactacggttcttgcagagttatagaagccttggtgtcttggataagatccagaagaattctctagattaccagacaaagactcttgttctctgcccttattttctcccaaacaaacagtctgtctctctgtgctgagctgcttggagctaggggaggggtgacacaagcacccctgtggccaccaccactgggacggtactgggtcagatcaaaagccagcacagaactgggtcttgcccaaggcttgctgtaaccacgacctacgttcgctcaaggccctagagttctctaatcagctgatggtgaagccagccagccttgtatcattcccttcggggtggcaaatcccctgagtgggtccagagatgctatccaggagctagggcctggagttggaaaccttaggaatctatctggtgctctattctactgcagctaagctagcactgaaaccacaaaaaaaataaaaataaaaaaaaaataaaaaagctcttcccactcttccctcccctttccccaggcagaggagtctctccccgtgtccaccactcaccactcccacaggtgcatagggaaggtgactgactgccaggacaccaccaatgtgcccttaaggcccaagggctcttcagtcagcttgtggtgaatgctgccaggcctgggactcacccttcagggcagtgggcttctctctgggccaggttaggtccagaagtgcagtccaagagccacggcctggaattgaggacccccagaggctgcctggtgctcttctccactgtggcaggcctgatacctaagctgcaggaccaagtcccctttattcttcttttctcaagcagaaggagtctctcctcagagccactacagctgggaatatgctgcgtcacatctgaagccagcacatctcagagtttctcacccggggcccacagcatatcctacctggctaccactgctgattattcagggctcaagggctctttagtcagcaggtgatggatcctgccaggactgggtcctccccttcaaggcagcggattcccttctggcccaggtgtgtctagaaatgtcatccaggagctagtgcctggaataggggcctcccgactctgcccagtgccctatcctgcagctgagctcgtatccaaggtgcaaaacaaagtcatctttactcttccctctcctctattcaagcagaaggaaggagtcactttcattgctgcaagctgtgctgcctgggattgggggagtactcccttagcacccgtgactagtgtctcactaggttgtgtgcccccacagtaccctggctccaagcccagcgcagcactaggacttgcctgggatttgcagcctttgtggcctagacagccttttaagtttatttaggaccccagggccatttagcccatggtggcaaggcttaccaaaactcaaattccagccactggtatgggcaatgtccctctggctaaggctggtttaaatgctccctccataggcaccagctgagttctgccctgtgctggcagcactgagttctaatgcaaagccccagcctctgcactcctcttcccacaagcacacagtttctctctctgcactaagtagccactactagaggatgggagaggggtggcatcagagattcaagactttcctttctaccctcttcagtgcctctgtcagtgatatgaatttaaaactacgtattgtgattgctaacctgatttttggttcttatgaaggtgctctttagtgtagatagttggcaaatgtggcgttcctatgaacagaacaattgctggaggcttctcttcggccatcttgctctgcatccctccttggggcttgcttgcttccttccttccttccttccttccttccttccttccttccttccttccttctttctttcttttgatggagtctcactctgttgccaggctgaaatgcagtggcgcaatctcagatcaccacaacctccgactccctggttcaagcgattctcctgcctcagcctcccaagtagctgggattacaggcacgtgccatcatgcccagctaatttttgtatttttagtagagacagggtttcaccatgttggccaggctggtctcgaactcctgacttcaagggatccgcccgtctcggcctcccagagtgttgcgattacaagcgtgagccaccacaccttgccattagccaccgcgcctggccagttctgtttgaaaagtctgaagttttgtttgaaaagtctcagctaggagtggtggctcatgcctataatcccagaaatttgggagaccaaagcgagaggatcgcttgaatccgagagttccagaccagcctgggcaacatggtgagatcccatctcttaaaataaaataaaataaaataaatagccaggtgtggtagcaagtgcctgtagtcccagctatttgggaggctgaagtggaagaatcacttgagcccaggtgatcaaggctgcagtgagctgtgatcatgctactgcactccagcctgggtgtcagagagagactgtgtctcaaaaaagaaaagtctcatcctcttggtttttttcataatctaaatgcatgcaagagagagacttcttgtgacctcattaattgagcccctcatcagggcatgaaaacatttatattgattcgttttctagataactaaaacttaccacttttgtgacaaaaaaaaaagttcaaaattgtgatcatttggatgaaaatatctaaaatgggcctggcgtggtggctcacgcctgtaatcccagcactttgggaggcccaggtgggtgggtcacctgagatcaggagtttgagacaagcctggccaacaggatgaaaccccatctctactaaaaatacaaaaattagctggacgtggtggtgggtgcctgtaatcccagctacttggaagtctgaggcaggagaatcgcttgaacccaggaagtggaggttgcagtgagccaaaataatgccactgcactccagcctgggagacagtgagactctatctcaaaaaaaaaaaaaaaggaaaatatctaaaatttatttgtgtgtccccaattctcaatagcaggtccatggctcattcaatggctcattcaattattagtgagtatgcttaggtgtcaggattcctgggactcagaaaatcaggacaagtgctgtgatcacagagctgtatcaacagtgctaattaatagagaatatttggtaacagacatgtttaatattagataaggagactgcatctggacactgaggaaatcctgggcaactttagccaagtgaactcattcacctcacttgttatgcctgagaactgagtcctttctccatgaaaacaaatacagaccatctaccatgcgacagcaactgctgaggatctagaagtataatggtgaatgaggaggctcctattcccactgagctgcaccctagtctaagagatgggcaagaaacaaatgaccaaacaggcagaggtttataatctgaggtgttagtaaaagccatgaagagaaataaagcaggatcgagagctactattttaaatcagtgcttctcaaattacccgaggtgaggaccagtttttcttttttcaatctgttttggactttttttttttttttttttttgagagatgaagtctcactctgtcgcccaggcttgagtgcgatggtgcaatcttggctcactgcatcctccgcctccctggtccaagcaattctcttgtctcagcttcccaagtagctgggacgacaggtatgcacagccatgcccagctaatttttgtattttttagtagagatggggtttcaccatgttggccaggctggttttgaactcctgacctctgggtacagagcataatatggttctaaactatttctgtttggctttaaaatcatttataacagagaaaccaaaatcgcaaggtgatagaaatagaagaagaaattttgaagcattggattaagcccaggatattaattttttcacttttctgcaaaaggaagcaagtgatgctgtattttcaaaatgtatctttaatcattcgtcagtaggcagtcccaacaatttctcctgtaaaattacaggtcaatttaagctattttgtgatggaaaaaatagattccagatctaagaatttcctatttgtgtatcttcttttgatggaaaacaaaattcaaaacattttgtcaaattcataagacatgtggtggtaagttttgacagatgtgcaatatcaagattatcacctattttattgataattatggaacatgtatgacaatctataatcatagcatctgaaggaacagtactggcaagtttctaacttctactttttccttttaatcttttgaaaaatatattgtactccttccttgcatggaaatattaagattactcaaaatactgatgatatcaaacaaatcagcaagattgtttttacattatttacatctttaaaaaggtggaaccaaggctgggtgcagtggctcacatctgtaatccaagcactttggggggccgaggcgagaggatcacttgaggtcaggagttcgataccagcctggccgacatggtgaaaccccatctctaccaaaaatacaaattagctgggcatggtgctgtgcgcctgtaatcccagccactggggaagtgagtcaggagaattgccggaacctgggagttggaggttgtagtgatccgagatcgcaccactgcactccagcctggagacagagtgagactccgtctcaaaaaaaaggtggaatcaacctattttttaatctttcagaggcgcagagtttgtttcacagttcaaacattcttgatggatggcctccttttgacaaacatcgtacctcaacatgcagtgttacatataatcagctttcatattgttacataaatataattatcttaattttaacacattagcttttatttaattcacaattcttactataatgctcatcacattgactttttttttgtagtaagatgttatggaggaagcagtatgttggtttatattccagtgtaaaatccttaatctgtgtatctattctagaaagctttcctgtcattgcggctacaccatcagaactcacccagacaggaagcttaaagtgcaaactacacttaaaccaatataatccttcagagttttaaacagctcagagctacttgtgtccataggcaattaagttgaaagaaataattatttatttgatagcatcatcttcaaatcacacatatactttaaaaactgccattggcagccatatgtggtggctcactcctgtaatcccctcattttgggaggccaaggcaggtagattgcttgcgcccaggagtttgagaccagcctggaccacatggcgaaaccctgtttctacaagaaaaaacaaaaaatacaaaaaattagccaggtgtggtggcacacaccttagccctggttactcaggaggctgaggtgggagaagttgaggctgcagtgagccatgagtgcattgctgcattccagcctgggcaacagagcaagaccctgtctcaaaaaaaaaaaaaaaaaaaaaaagactgccattggcaatatgtgtacattagtcaagttgcaaagaaaatactagcttaatttattcagttggttggtttctgtagttcctgaatacactgagctataatatcataggaaaatggtacctgagctaccttctctgtcaaagatttacccatttccaaataaaattttttttttttttttttttgagacagagtcttgctgtcgcccaggctggagtgcagtggcacgatattggctcactgctatctctgcctcccaggttcaagcaattctcctgcctcagcctcccaagtagttgggattacatgcgcccaccaccacacccagctaatttttgtatttttagtagacacggggtttcaccatgttagctgagctggtctcaaactcctgacctcaagtgatccgcccacctcagcctcccaaagtgctgagattacaggcatgagccaccgagcccggcctcaaacatcctttcttcaatcttttactaatgtctcagcaactgtacttttcaatcttagcaacccaaagtgctgcttcataagatacctgcaaattactaatgtttgtaaatgaaatatcaagtgactgcttccatcagctttttaatttgttagtctttccttaagaggatttttttttcgttttaaaaagagatgaggtctcattatgtttcccaggctgctctcaaactcctgcgttcaggtgatcctcccgcttctgcctcccaaagtgctaggatcacaggagtgagccaccgcacccagcaaaaggattattttggtattgaacttttcacgctttctatgtaaatgctgcttaagttttgatggtttcaaagcataattagccagtacagctctataaataacacatcatagtttttagcaatttgccatcaatgatcgctacaaacccaacattaatacataagtgaatatatatctgagtaaattagtatatatgattttgcttttatgctattggaaataacatctgttgttactatttggttgactatcactgctatttttggaaaaaaacaagtcttttcttgacaaaaatagtccagtaaatcttgtgtcaccatcagtaaattaaggtaaaaaatacagaaaaccaggcacagtggctcacacctgtagtcccaacactttgggaggccgagacgggcggatcacctgatgccaggagtttgagaccagcctgctcaacatggcgaaaccccgtctctactaaaaacacaaaaattagccgggcgtggtggcctgtgcccgtaatcccagctactcgggaggctgaggcaggagaatcacttgaaccagggagtcggaggttgcagttagccaagattgtgccactgcactccagcctggacgagagtgagatttcatctcaaaaaaaaaaaaaaaaagcaaaaacaaaatacagaatacaaaattgtctttacaactaataatgctaaactataaattgaaaggcaagcctaattaagggctaaaattacgataatgtaataaattatgaaaatgtatgtgtggtcctaacatgcacgactaggatgtagtgcactctacatgactcagcacctgaattcaaagccccccaaactcatctataccccggtcagtgagacaagtcactgtcttggatattgcagcaaattctagatgtgcaccttcaaaatttctgggctcaactcatggccaaatggcagcaaactgttcacagacaaactccggtctgtttgcctcacttggagtagcaccgttttaaaatggcagggattgaatcttgatagaggtgacatttgagcagaaacttgaaagaagggaggctacccgtcttattcatatttgggggaaggcagtgtaggtagtagggccagcaggtgtaaacttcttcctcaggcagaaacatgcttgtgtgctttagaagtagccaccggggcagcgtggtggccgcagagtggagaaggggcagggccacgtgggatgaggttggagacagtgggcaggggctagatgacactggctttgtagtcaagataacaacttttgggccaggcgcggtggctcacgcctgtaatcccagcacattgggaggccaaggtgggtggatcacctgaggtcaggagttcgaaaccagcctgcccaacatggtgaaaccctgtctctactaaaaatacaaaaattagccgggcatggtggcacatgcctgtaatcccagctacttgggaggccaagccacgagaatcgcttgaacccaggaggcagaggttgcagtgaaccgagatagtgccattgcactctagcctgggcaacagagtgagactctctctcaaaaacaacaaaaaaaccccttttgattttgctcggagtgggggatttgagatggggagtgacatgttcaggtaagtaatttactcccaaattaaacttcccaggattacccacaattcccctgcatatggcaaatcttgcagtagatcaggagggtctagggtcaagaggatgaagcaaacgccactgaagcggctacgttgtctggggtataaacccggggttcggccgggcatggtggctcacacctgtaatcccagcactttgggaggccaaagcgagtggatcacctaaggttgggagtttgagaccagcctgaccaacatggagaaactccgtctctactaaaaatacaaaattagcctggtgtggcggcgcatgcctgtattcccagctacttgtgaggctgaggcaagagaatcacttgaacttggaaggctgaggctgcggtgagccgagattgcaccattgaactccaacctgggaaacaagagcgaaattccatctcaaacaaaacaaaacaaaacaaaaaaacccggggttcattgtcgggtaccagagtaatttaggacacagacacacaggaggagtttaggggtggaggtttaacagttagaagagaagagaaagaaaaacagcttcctcttaaaggaagtgtgtctggagttggttcctgccagtgggtttgtggtctcgctgacttcaagaatggagccatggacctttgcagtgttagaactcttgaagatggcacggacccaaagagtgaacagcagcaagatttattgtgaagagctaaagaacaaagcatccacagcgttgatggggacccgaggcgggttactgctgctggctggggggtggccagcttttattcccttatttgtcccctcccatgttctgtttctgtcctgtcagagtgcccttttttcaatcctccccgcgattgcctacttttagactcctgccgatggttgcattttacagagcactgattggtgcattttacaatcctcttgctcactacagagtgctgattggtgcatttttacagagcactgattggtgtattttacaatcctcttactagctacagaatgctgattggtgcattttacaatcctcttctaagacagaaaagttctccaagtccccactcgacccaggaagtccagctggcttcacctctcagaaggagtctctgagcagaaaggaccagctggtggagaacgcaccgagttttatagtccagtttgaggaggtgttgtctgatttactaggcctcacagattggttccatcatgtatgacatttacaaagctctctgggaaggcttgtcgccctaccctaatcttcttatgcaaatggactttccagttgatgggggccatattatctgcttcttaccgtacacgtggctggcagagaaggcaagatggagccaccatcttgaaaaggtctagtccttagttcctgctggcattcatctgtgcagcaagctgccagcttgcttgtctatgtctgcagctcaacttttatcagctgctctttgttagaaaattatttggggctgcttttcattaaaaggaaagccctaccaaggactcccatgcccttgctatctccctaagtaattcctttttacctcctatatcaccacaagccagctttcctgggagtcccctagtttctctccaggccctaggtcacttcctatcaccactgaatctgtcagcatctttttggtgcactcaggcctcctggctctcctcctcagtatagccttgaattaatcaccaacttatcacatagtgaacagatgtagccttttccaaatcactcagggtcttcattctgaacccaaatcaccactctgtgctttaaaatatctctcccttgcagtttggtgtgggtgtaggactacattctggccaatggagcttgagcagaagtgatacatgcaactttcaagtcatgccccgtgcccgttcttttctttctgcaggagggaatacagatgaattggcaggatcaggagcagccatgttgcaccaagagaagatgaaaaaagcatatgttgcagattgcaaagtaactaggtaagcatttgagtccctaaaactattcctggtatgactggtagcggcatactagcttggacttttttgtgtcagagaaataaaccttcatctcacttaaatcagtattatttggggccactctctctgtagtaggagtgaaactagtatcctaactaatttaactgtcaaaagaaaaaaaaatatgaggcgagaaaataaggaatcaagaaacaaaagtcaagttttactcacttcatagcttggctcaaaagcaactttaaatatgtgagaaatgcaacaaatgataatcatgcatacagagaaattcctcaagtgacaaatgcttttactttcatttcctttcttgaaaattgacagagtaagattcagatgcatgtactgacactcacgtcagtaacatcggctcaggttagactttggtcgtcttatccttcgactacctaagggactcatggccagtatattttacaacccccagtgccagttactgaattctcacctgagaatgaattccctaagtctgtaatgtttcatcatcttgcaacacagataagcctgtgtttagagcaggcttttccatatgagtccctcctctttcacactggggctgagtagaaggtgattgacctgcctgagactttatcagtttggagttcatgttccatgtggtgttggagggagcaatggaggctgtgaaatcagacatcctgctttttgacagggttgtttgatgactcacccaagccattttttattctcggtgcatattctagtttcccttctcccgacagtagcctgatgcacctgtgcttgcactgtccttaagcctgttgctattgttatgtggtgtcactgagcccaacactgcgtgcgtgtgtgtgtgtgtgtgtgtgtgtgtgtgtgttgaaaggggtaggaaagtgaggatgattttcaaccattaaacccttaaggggccatcttctgaagcctggcatcatcatttttgttctcaagaacatttaagtcaaaaataacaaggttccttttgctcatcttcaaattattttacttgtttgatccaactgctaactagaaggtgaattctttctgctgtcatttcataattctagtgtattaaaaagagatgggggctgggcacggtggctcatgcctgtaatcccagcactttgggaggtcaaggtgggaggatcacttgaggccaggagttcaagaccagcctgagcaacatagcaaggcctcctacaaaaaattttaaaaattagctgggcatggtgacacccacctgtagtcccagctgcttgggaggctgaggcaggaggattgcttgagcccaggagtttaaggttgcaatgagcttcaagtttttataccttcaatcataccatttgtggcttaggaacccctaatatattacatggagggtaatgtagacaccaagaaaatgattgaaaacaatttatgcctaaatacatttgtattcttctttagagaaacctagtagacaaactaaaagctactaagcaaataaatcaaggtactgtattttacaaaatgactcaatttatgcatcatttaaagagtgtggatcccttgggaactttaaacatggttgcattagttaaacagttgcttcattcagatccctctaggaacttgggcagcacaagggaaggggggcctctgttcctactgtgtggtcctggtgatctgtgtaggtatcttcttttaccgggttaagtgataaaaacggtgtcttgtgctcttttatccaagtccaaggagcatctttgtgggtgtggggttgcaattatacctttcctccctgggctgaatccacaaagaagaagagaaaaataacatttctggagacctggccaagccctggaataaaatggttgcctgagagaaactgcaagtttgggaggcggggactcttttcattgtaaccaagagtggagtcctccatttctttttcttttttctttttctttttttttttttttttttttttttgagacggagtctcactctgtcgcctaggctggagtgcaatggctcaatctcggctctctgcaacgtctgcctcctgggttcaagctattctcctgcctcagcctctcaagtagctgggattacaggcgcttgccaccaggcccagctaattttttgtatttttagtagagataaggtttcaccatgttggccaggctggtctcgaactcttgacatcaggtgacccacccaccttggcctcccaaagtgctgggattacaggtgtgagccaccgcgcccggcctcctccatttcttttactttcctttagtcaataatggagacagtgaaggcataaaagtgttcatgctaaagaccattttgaaaatccagccacttcctgtctgttacactccagctgcctatgtcctcatcgtgtaatgggagggtcactctagaagaggaatgggccaccgactgtctaatgtgaccatcctcctgctgaacttggggaaaatgtcactttttgctctgaacccagacctaacctctggatcttgctctatgccatgctccagaaagccaccactatcaatgtgagttgccacaaaaattcaattttttgtttaatagacttaggatcttcagtgaaacttatggccatccccagtggtcacttccatctctaacatctcacgactttatgaaaataaaacaaccagctatcatcagggagagaacacagagttaggagttagtggataagggtgagggtcatgggtgagttacttcccttctcaagccccctactctctccttcagatctacatgttactgtctcaggccaggttccctgaccatcctgtttgcagtgacaactgttgccccccacctctaagtactccctaccccacttcccgttttatatctgatcattagcatttgtgatggttaattttatgtttcatcttgactgggtcatggggttcccagatacttggcaaaacgtcatttccaattctgtctatgagtggatcaccctcctcaatgggctgttgagggctttaaggcagaggaagggagaatttggccttttttttttggagacagagtctcactctgtcacccgggctggagtgcagtggtgcgatcttaactcactgcaacctctgcctcccaggttcaagcgattctcccgcctcagcctcccaaatagctgggattacaggcacatgccaccatgcccagctaatttttgtatttttagtagagatggggtttcaccatattggccaggctggtctcaaactcctgagctcaagtgatccacttgcctcggccccctaaagtgctgggattacaggcgtgagccacctcgcccagccctgaatttggtccttcttttctgccagatgacttgagctggaatatcactctctccttccctcagactgcagtttacatcatcagctcccctggttctcaggcctttggactcagattgaatgatacccctggctttccccagctgccagcttgcagatggcagatggtgggacttctcggcctccacaatcacataagccaattccttatgataactctccttctctttctctcctctcccctctctattttgagctgattattttgggaaactgcaaccacaggagaagctctgaaaacagagtggaagttaccttatcatccacattaccccaggaggacaggatgactctaagtcactggagacagttatcctttattgatggagaaggcactgacttaaatctccataacaaatcttactcttatttgccagtttttcctgagcataatcaactttccctacacccttctttttgtttcagcagacatggcatttaagtgtgagttcaaagccacctctttgaaatttaccaatttctctgggtatctccctgtatactacacgaggtatacatgttaataatcttctgtttatttgtctctttttaatctgttttttgttacagtggcccatcccaactaagaattatgaaagattgagagaaaattatctatttccctacatttatagtaatgtaaatagcatagccactctggaaaatatcagtttcttaaaaagctaaacacttggccaggcacagtggctcacatctgtaatcctaacaccttgggaggccaaggcgggcagatcacctgaggtcaggggtttgagaccaggctggccaacatgtcaaaaccccgtcactactaaaaaatacaaaaattagctgggagtgatggcaggcgccaataatcccagccattcaggaggctgaggcaggagaatggcttgaacctcggaggcggaggttgcagggggcaaagatcgcgtcactgcacttcagcctgggcggcagagcaagactctgtctcaaaaaaaaaaaaaaaaaaaataggccaggcacagtggctcaagcctgtaatcccagcactttgggaggccgaggtgggcagatcacgaggtcaggagatcgagaccatcctggctaacacggtgaaaccccctctctactaaaaatacaaaaaatcagccgggcgcagtggcaggcgcctatagtcccagctacttgggaggctgaggcaggagaatggcatgaacccgggaggcggagcttgcagtgagccgagattgcgccactgcactccagcctaggcgacagagcgagactccgtctcaaaagaaaaaaaaaaattctgatccccgaatgctcagggagactgatttgagtaataatgaaactctggtctcccacacagacagctctgcatgaatgactctttctctgtagaaattcccctatcttgataaaacagctctgtctaggcagtgagcagggtgaacccgctgggcagttacagcatgaggcagccttgtagtgatggcacagttgtgtatctcgattgtgttggtggttacaggaagctacactcgtaataagattgtatagaagtacacacgtgtgtgcttataaaaacaatgaaatctgaatcagctctgtggagcatttcaatgtcaatttcctgattttgattttgtactgtaattattcaagatgttaccaccactgaaggaggctaggtatagggtacactgggcctccctgtacactttctttgaaccttctggtgactctatcattatttcaaaatgaaaagtcaaaaaagaaattgtagttgggctctcaagcttagcgtgtggtcagtggggaaccacacgggttcaacatgcgcatcgagaagtgttatttctgttcggggcccatctaccctggctatgacatgttgttcatccacaacgattgcaaagtgttcggattttgtaaatctaaatgtcataaacactttaaaaagaagtgcaatcctcgcaaagttaggcggaccaaaccattccagaaagcagctggtaaagagcttacagtagataattcatttgaatttgacaaacatagaaatgaacttatcaaataccagcgagagctatggaataaaactattgatgcaatgaagagagttgaagagatcaaacagaaacaccaagctaaatttataatgaacagattgaagaaaaataaagagctacagaaagttcaggatatcaaagaagtcaagcaaagcatccatcttacccaagcccgtcttgcaggcaaagggaaggagttggaagagaaaatggtacagcagttacaacaggatgtggacatgaagatgcttcttaaacatttctgtaaccatttattttatggacatttgaaaatgccctttggagacttggaactgctaaattattagtttattttttacataagttcatttaaatgaaaagtgattaaaatatatctctcctacactgccatctacaaaacacaagatattacggatgttagattgcatctcagtattaaatcttcactgatatgtgtacttatgtaaatcacgaaaattctacttataactgtagaagtgaattgtggacgtaaaatggttatgtcatctggataatggactagacagcatttgtataatcactaatggcaaaaaatcatggctagtgatgtataaaataaaatattctttgcagtaaaatattcactttattaatgttatagaaggggggagacaacaaggaactaacaatttgtatgacggtgtcaaatattttgattttagtatttcctgttttggtttatttgcatcttagaagagcataatgacattgtttgatgaagcctaattatgctggactgtttcaacttggtttaacctttctgataggtagttgtggatgtttgggatgagaactgaataatctttgcctggagtgacactacactctagaatttccactttggagaatactcagttctaacttctgattcctggtagaaaaaactttatttttctagcctagcaatgatctagaagcagaggaatcctagtgccttttaaaagttattatgtggttttctgttaaaaagctcctgtttttggaaagtagaatttatggatacaacatctgctcattatttgcacataaaataaaaccatttaaaaagaaaaaaattatagttggacataaaacaatgtttaaatttaaaattacctcaggatatagacatgcatggaactaatattttatacataatcttaacttgcttttgtcagtgtatctacttgtaaatgtgtctcaccattcggttccctgtgttctgttgctgaatatggtgttatagcacttctggtatgatagccgtggactgttctctgattttctccattttttgctaatgatgtgtaactatgacatgtggacagtacccggattgcctggtttgatcactatggctacttatgtaagcatctcatggcaaatcttgtcagagcacatatagattctgtgaatctgcatggtcagagtaagcttgctctctttgggtggctggagggttatgaatatttttcacaactgtcacttcctgaacttgacctttggtatactttccagatttgctaatgcatctgctatgcttgaggcatggctttaaaataatataactttttcggccaggtgcggtggctcatgcctctaatcccagcactttgggaggctgagacaggcggatcacttgaggtcaggacttcaacaccagcctggccaacatggcgaaaccctgtctctacaaaaaatacaaaaattagcctggcatggtggtgcatgcctgtaatcccagctactcgggaggctgaggcacgagaattacttgaacccgggagatcatgccacttcactccagcctgggcaacagagcaagactgtctcaaaaaaaaaaaaaaaaaattgggccaggtgcagtggctcacgcctataatctcaacagtttggtggactgaggcagctggttcatttgagctcaggagttggagatcagcctgaccaacatgggtgaaaccccgtctctactaaaaatacaaaaattagccaggcgtggtggtgcatgcctataatcccaactacttgggaggctgaggcacgagaatctcttgaacccaggaggcgaaggttgcagtgagctgagatcgcaccactaaacttcagcctgggtgacagagtgagactccatctcaaaaaaaatttatatatatatatataaagattatatatataaaatattatgtatataatatatatataactttctcaaagcaaacgataccattttgatctcctattatgtactagttgttacatatgttatcttatttagaacttatactaatctagtgaaatatgtgtttctttccttgtagaacataaacaagagaaattatttatctgaataaatgttgttcctaagcaccgttattccagcaatgctgttgtgcttcacagccctgttaaacgtgtcttttaggcttgttttctgactctgtagcacatccttttgactgcactcagttgtggaaaattttgatctttttaagtgtaggcatctgtagtcccagctatttgggaagctctgctgggaggatcccttgagcccaggaggtagagggtacagtgagctatgatcgtgccattgcactccagcctgggtgacagagcatgaccctgtctcaacagcgtctcaacaaaacaacaacaacaacgaaaccaaaccagccaaccaaacaaaaataataaagtttagaatttgtctacctacttacctacctacctgtatctatcatcaaaagtaattcagcacaaattaaaataaggaagtatttttaacttacaggttatagaatgcatttccaatgccaccaaagatgcagagaaccctctgtattgctggagaaagtgtgaattgctactactttttggaaagcatgttgacaatatattatgtccacagcctttaaaaatgttcacaccttttaatgagtcattctacttttaggcatgtatgatatattttgaaaactttgtaacaattgacatccactgcagccacagtctaatggagggaaacggaaacccagtccaccacctacacaatctattccaaccccaatttaccataaggttttacttctgttatgactttttgcatgcattttttttaacacgttggctttcttgggagggtaaagttttttcaagaactaagtgtattttcaagaacccagcacataatagatgctctgaataaattttattcaccaattttattcactggcttaccacgagccagtcctgtacagacattaatttatttcaagacaaccctataaagtaggcttttctttcatattttataggtgaggaaacttgaggcagagagagaataagtaattagcccaaggtcatacagctagtaagaagtggggtaaggtgggaagccaggcaacctctcctgagctctaggctcttaactgcctctccagtgtgagcagacagtcacaaaatgtgccaggactgcaccagttgatatacatgttaattaaataaacatgaacccaggacgacactgataaataatcatgagaaaattagagcattctcttagtgaaacattatataatcattgacatcatgctttcaaaacttacacattagtctggataaatgtttttaacactaagcaaaaatcaggagacagaagtgtatgtgcagcatggttatacctaacacaaaatgactggaaagaaacacatcaaaagtgtcaagaagctgcaaatcagatgggcattcattcatctctccttttcactgttaatttccattttcctttaatcagcctattagtttgctactgctgctgtaacaaagttccacaaactgggtgacttaaaacaacagaaatttattctctcacaggagcccagaaatctgaaattgaagtttggataggattggttccttctggaggctgttggggagaatctgttcttgcctctcttagcttctggtggtggctgtcatccttggggtttcctggcttgtagttgtgttcctgcaatctctgctgctgtcttcacacgcccttcttccctgagcatcttcatatggccttcttgtaaggagtaagtcattggatttgggttcaaatctaacccagtataacctcatcttaactcattattctgcaaagatcctttcaccaaataaggtcacattccgaggttctgggtacacataaattttgaggggatactacttaccccagtataatgagcaatttttttctattattttatattggaaaaatgtaaacattaagaaaatagaagcttgagcctaacttctatgaagttaggtggatgattaaacagaatcagaatagttgtaactaagtgatggtacagctaaaacactttttccaacatggtcacagacataaagcagcatggcagcttagtacaaatactagatctagaaacttcagcctgggttagattcctgcctccccacctgccttgtgtgcctttgggtgaagggctcaaacattctgaaacttgtcttccactcctgtacagaaagaaagctatgggtattttagacttcaactgtttctagccagacaactggaccttccaagaggtccagcataaatcatttccatggggaagtaaactttttcctgtctttttcctctcactggggctggagagatgggagaaaggagtaaaaaatattttaaagccttgcatgttcccctgggaggccagggtgcaagaagagctcatgaatggatatttggctgaggtgtgacctggagtgttttgcataatgaagcaaggctggttgagctggcagagatccaaggaagggggctggagggatgagggagtctgtaatgggagtgaggagcaggaggtcacagccacgtggcagaagccttgcagcctgtggaggaaagcccacctaggggtgaaggtttgccaagaaattctcaggactgaaggagaaggtgcgcactgttcagcattaggctgtttgcccaggagtgccatcgcattccccagtgtgagaacggccacctcttggtcgttttctcaacctttggtgaacacttatgacatcgtggggagagatggagaaaaggactttgtgttctcatctggggcgtcatgctggggcacccgaacacagaacccatgagtgagccttgaaggggccaactgagccagaggaggttggaagagctgcgccactcctgtcccactgcaggtgggatagagttcccgctaatttcatttacatttgtacctcaaagcacgaagtggtttagctgacttctgctcttcatgaagggcccagctcacatcctttagtaataattcaaacattctgacttgcactgggcagcatgtttatcataaatgcaaggactgctactttggtgtaggaaattatttaaacgtgtaaactctcatataccaatttgcaaatcaaactcttttcaaggctttatttcaatgtcgttgttagcttttttgacttttctcattttcccactagtttgcttgattgcacattatagaaaattcaccattctcattcattctgatcccacatttagacttctctttcaaggacttgaaagaatttataaatatttgcaatacaggatgcaaattaatccttatacacacttggaaggtaccctgcaatatctttccccatctatcactcacccactgtttattgccctctgaacaatgtccagcctagttcctttcttatttcgttacatacataaaattgcttcccatccacaatctctccttagaaatgctgccctttggccgggcacgatggctcatgcctgtaatccctgtgctttgggaggccaagtagggccgatcacctgagttcaggagttcgagaccagcctgaccaacatagagaaaccccatctctacaaaaaatacaaaattacccaggcatggtggcgcatgcctgtaatcccagctactcgggaggctgaggcaggggaatcacttgaaaccaggaggcagaggttgtggtgagccgagatcgtgccattgtactccagcctgggaaacaagagtgaaactccatctcaaaaaaaaaaaagaaaaagaaaaagaaaaaaaaagaaatgccgcccttcccacagctaccctacttaccacgttactgcagactgcaccaccagtgaatgtgacccaagttgcagtaaatgaaatatctcccagaaatttggagttgggacatagggactgagcaacttatcatctctgaaggaccagactggagagaaaggggagagagacagagagagagagagagagagagagagagagagagagagaaactgcctggagttgctactcccagttctcaagttcagttgggtttcttaagatttatctctttataataaatctccctttacatgaattagcatgagtgggttttagttaattaattatactaattttttttttttttgagacggagtttcactcttgttgcccagactggagtgcaatggcacgatctcgcctcactgcaacctccacctcccgggttcaagcaaattctcctacctcagcctcccaagtagctgggattataggcatgcgccaccatgcccagctaatttttgtatttttagtagagatggggttccatcatgttggccaggctggtctcaaactcctgacatcatgtgatccacccgctttggcctcccaaagcgctgggattataggcgtgagccactgcgtccggccaaccaaataattcttcagtcagattttcagagtgagtcttcaaaacaaagtttataaaatcagtgagtacatattaaccatattaggagctaatctcattcatttttctttccttttctatttcctcttttaaaaatgtgaaatgtatcatccatacagaagagtgagcaaaatttacatatatggtttaaagcagcccctggttgaaaccatacgtatgtgttttatgcactcttctaggcctgatggtaaatatttttagctttgcaggatatatagtctctgccaaaactgctctagactgctattacagcatggaagcagctatacgaaatacgtaatggatgaacatggctgtgttccaacagaactttatttataaaaacagatactgggctgatttggcccacaggtcataatttgctgatccctggcttgaggaaaaattttaaagcaaaggtctgtataaccaccactcaagttaagacatagacacagacacatccctgtgtgtccctcctagatgagaacacttcagtcctctctagactgggcccctatcctgacacttgggatgaacattttcttgagtctttttataactttgccgtgtatgtatgcatttctaaacagtatagcttattttgccttattttttgaaaagagaaccgtatttaatgcatgcatccttttttctcctcctcttccttcttggcttgcttttttatgtttgtgaaattcacacacaagtagctgtaatttgccttattactgtacagtttttcattgtatataagacaccagaatgtttgtttgtttcttaaatatattccactgctgattaaaatttgggctgttttcagttggggagcaataatgaacaatgtagccatgaatgtttcaaatgtcctctgaaacctaaaacctattagtcaccaccttgttatttggcagaatatagaagctaacagataagggagccttggtgacacagtgaataaagattagcccccagccattcagagcagagaggagagggtggagagtaactctcaagggcagtccaagaatatgcagcactcatgtctcaacgactttcaaaggattgaaagaagtcacagcatcttctctcaccaaatgcaatttaatagaaatcaacaataaatttatatagaaaattctcaggctgggcgcgatggcttatgcctgtaatcccagcactttgggaggccaaggcaggcagatcacttgaggtcaggagttcgagaccagcctggccaacatggtgaaaccctgtctctactaaaaatacaaaattagctgggtgtggtggtgctcacctgtagtcccagctacccaggagaccgaggcaggagaactgcttgaacctgggaggcagaggttgcagtgagccaaaattgtgccattttactccagcctgggcaacagagcgagactacatctcaaaaaagaaaaaaaagagagagaaaattctcatggctgggcatggtggctcacatctgtaatcccagcactttgggaggccgaggcaggtggatcacttgagcccaggagttcaagaccagcctaggcaacatggtgaaaacccatctctatttaaaatttttaaaaaagaaggagaaaattctcatatgttcaaaaatcaagaaattgttttaagaaccccacagattaaagaataagtcctactgaaaatttaaaaaaaatttttgaatggtaatgaaataccacatatttaaatttgggggtacaactgaagtagaaaatagatgaaaatttgtagcttcatatttgcatgtaatacacagtttaaaatagactaagatagtgtattagtttgttttcatgctgctgataaagacatacctgagactgggcaatttacgaaagaaagaggttgattggacttacagttccacatggctggggaggcctcaagatcatggcagaaggcaaggaggagcaagtcacatcttatgtggatggcagcaggcaaagagagagcttatgcagggaaactctcatttttaaaaccatcagatcttgtgagacccattcactatcatgagaacagcacgagaaagtcccgtcctcataattcaatcatctctcactgggtccctcccacaacaagtgggaattatgggagctacaagatgagatttggatggggtcacagagccaaaccatatcagacagaaatgatgaaaggctgaaaattaatgagctgagtatctatctaaagaacttaaagagccacaaaataagcccaaagaatataaaataagtaaatatatagtagtaataagaaagtaagtagaaagtaagtagtagaaagataagaatagaaaacaatgaaatagaaaacaaatatactgctgggtgcggtggctcacgcctgtaatcccaacactttgggaggctgaaggccaggagttcaagaccagcctggacaacatagagagacctcacctctatttaaaaaaaaaaaaaaaaaaattagcctggtgtggtggcatgtgcctgtagtcccagctatttgggaggctgaggcgagaggattgcttgagcccaggaggtggaggctgcagtgagccatgattgtgccactgcactccagccgaagtgacagagggagatcctctctcgaaaagaaaagaaaacaagcatgcaatagagaggaatgacacaatcataaggtgattccttcatgagaataataagatggcaaaactctggaaagagagtgagaacacatataatgttatgaacgaagaaagaacattacaagccaggcacagtggctcacgcctgcaatcccagtacgttgggaagccaaagtgggcagattgcttgaggccaggagtttgagacaagcctgagcaacatagcaagactccatctctacaaaaaaaatacaaaaattaggtgggtattgtggcatgcacctgtggtcctagctacttgggaggctgaggtggaaggattgcttaagcccaggaggttaaggctgcagtgagccatgatcacaccactgcattccagcctgggtgactgagcaagattctatctcaaaaaaaaaaaaaaaaagaaaaaggaaaaggaacattacttaagcgccacagacattaaaaagatatgagtaagttgtgaacaactttttgccagttcatttgaaaaattaagttaaatggacaatttcatatagacatatattatataggaatctctatcataataagtgagtacaaagtgagtaattgtaatgctcagatctggggaggatggaatctcagggaggggagctgcatttccactgatatttggtgatctaggagcgggtgcctgagaggctgatcaatgcttttggacaaccttgcagggattgcagggagaggtgcactggcatcctggagtccagggctgccaagaaggtaaggccccgatgagcaacttttgctttgtgttagaaccctgaagggctacacgctatgaataggggtgaactagaatataacacactattgttgggactgcagctcaacctcaaatcttcccagtctctcaaattggattgctagtgttccaggctcctggcaggggcaaatttctctagagaaagatggcatcaacctaggcatcaaattatttctaaaaataattttgcaaatataaagtccagcacagaataaaaaacaacaaggcagccaggcacagtggctcatgcctgtaatcccagcgctttggggggccgaggcaggtgatcacttgatgtcaggagttcgagaccagcctggccaacatggtgaaaccctgcctctattaaaaatacaaaaaataggcgtgctggcgcaggcttataatcccagttactcgagagactgaggcaggcgaattgcttaaacctgggaggtggagattgcagtgagccaagatcccaccactgcactccagcctgggctacagagtgagactccatctaaaaaaagaaaataaaagagaagaaaaaagacagccaggccacatgtggagacaaaatactatatgagcaaaaaagagcagaactagcaaaaattgaaacagacctaaaggaactccagatactggagttagcagacaagacttgcttatgatattcaagattaaaagcaagacataatttcagcagagatctgaaaactacaaaaaagacccactacaagaaaggattatttcaggctaatctcactcatgaaaatagttgtaaaaatcctatgcaaaatatttacaaatagaatccaacaatatgcaaataggcaataagtaatgatcaagttgggtgtttttttttccccaggaaaagaagatttatttagcactcaaaaatcaaccattgtaattatctacattaccagaacagaggagaaaaaaatgtaaaatcacgtcaaaagatgtagaaaaaaatttgattacattcggtatccattcggtatccatttgtcatcaatggaaaaaataaaaagaaacttccttatctgataatgagcatctacaaaaagcctattgtgaacaccataattaatagttaaatgttgaaaattttcttttgatttggggaatagggcaagtatgttggctaagtcctcttggaagcagacgtcaagatggatttagaagtgcaatggatttattggaggcaattcccatgaaagctcaagaggggaggcagcaagagagggcagagaaagcttcagacctaaatgctgatctgacccctgtgcaaggagaagggaaggaagaggataaggtaggaagaacagcaaattacactgcagctctgagaatatcttgactagccgaatggggagctgtggctcaaagatttcccatggaggagtcccacaccggccaaaaagatgagtccttgcatcactgccaagcccattaattgattgaaggctgctctggaaatctatggcccagctcaaaagctgaagaagatgctgaaggtgcctgcagccagaagctgtgagccaactgcactctccaaggcaggttttttttttttttttttttttttgagatggagtctcactctcacccaggctggagtgcagtggcatgatctcgactcactgcaacctgcacctcccaggttcaagcaattcttctgcctcagcctctctagtagctgggactacaggcgtgtgctaccacgcatggctaatttttgtattttttgtagaaatggggtttcaccatgttggccaggctggtctcaaactcctgagctcaggtgatccaactgccccagcttcccaaaatgctggaattacaggcatgagccaccgcacctggcttctgttttgaaggaagatatgagagactcacctccacatctgccacaagaatattcaatatcaccacttctattcaatattgtactagaggtcccagtcagggaataaagaatagaaaaatacagagaataaatttagaaatttagaaagaaacactactgatgttatttgaagatttagaaagaaatgtatacatttagaaactctactgacgttatttgaaagttatatggctgtgtatatacaatattctaaaggaatatataaataagcatttagaataagtgagttaagcaattttgttgcatataatgtctacgtaaaaaggcaactgtggcctagtgcagtggctcacgcctgtaatcccagcactttgggaggccaacgtgggaggatcacaaggtcaggagttcgagacgagcctgaccaacatggtgaaaccctgtctctactaaaaataaaaaaattaaccgggcatggtgccacacacctgtaatcccagctactcaggaggctgaggcaggagaatcgcttgaacctgggaggcggaggttgcagtgagccaagatggcaccactgcactccagcctgggcaacagagtgagactccgtcaaaaaaaaaagtcacttgcatccttaaatagcagtagcatagaaaaataaggtatcaggccaagtgcactggttcatgcctataattccagcactttgggaggttgaggcaggaggatggcttgaccccaggagatcaagaccaacctaagctaggcaacataggtaagaccctgtctcaacaaaaaataaaaatatcgaccaggcatggtggcacatgcctgtagtcccagctacttagaaggctgaggtggaaggattgcttgagcccaggaggtcgaggttgaaataagccatgctggtaccacttcactccagccttggtgacagagagagaccctgtctaaaacaaacaaacaaaaatcaggtttcaagaaatacaatttaaaaatgatgcgcaagagctttacacagagaactgtaatgcattattaagagaaatacacacacccactcccgcaaataaaagaagaaacaaaccatgttcacaaattgttagaataaatattgcaaaaatgtcacttctctgtattgatctatggattctatttacattttacaattttttttttagagacaaggtgatttaaaattaaacaggttgtacacattttcatgtttcttagctactggatatcaccttttataaagcgcatgttccaattgcttgcctatttttccctttattgtctgtctttttcttattgaattacagaagttctatgtatcttccaagtacaagtccaagtccttctcactatgtgtattacaaatatctttttccagtttgtggcttgtttttcactctcttaaggaaagattttaacttttttctttatgttaaatgcattgtgtgtcttgttgaagtaatccttccctattccaagaacatgagggtattatcttttattatcctctacaaactttattgtttcaccttgcacatttaagtctatgatcaacctgttattaattttagcatacggtgtgaggtaaggtcaagttttattttctttatatgagggttcaatgtaaactgggtattctgggtcaggtgtggtggctcacacctgtaatcccagcactttgggaggctgaggcgagtggattacttgaggtcaggagttcaagaccagcctcgccaacagggtgaaaccccgtgtctacaataatacaaaaattagcctggcgtggtggcacgtgcctataatcccagctgcttgggaggctgaggcaggagaattgcttgaacccaggagttggaggttgcagtgagctgagatagcgccattgcactctggcctgggcaacagagtgagatctatatctatgtctatatctatatctatggcattctgtatatgaatgttgtaataagttctcttatctagtaaagtgtgtctgtccactttattcctcaagaataccttggctattcttggtccttcacatttccatataaaattttagaaccagtttattaaattccactaagtaagagaaagaaaaaaaaacctgttggagtttttatgagaattatattgggtgtggtagcctgtgcctatactcctagctatttgggaggctgaggcaggaggattgcttgagcccaggaggttgaggctgcagtgagccatgatcatgccactgcactccaacctgggtgatagggaggtcaaggctacagtgagctgtgattgccccactgcactccagcctagagtgagtgccagagtgagaaccggtctcaaaaaacaaattaaaaaaagtaaaacaactaaaaagaatacaacatcacttgcatagtagtccttccatttttgcactacctgagcttagtcatgaggaaacatcagacaaacaggaattgggagatatttacaaaggaactgtatttttctcaaacgcccgtatgatgaaagataaataaaagctgaggaattgtgccattataaagaagactaaagacacattagaataaaatgcattgagtgatcctggattggatttcataccagaaaacataaaaattgctatagaggacatttttgagacaattggtaaaattcaaatacgatctatacattggataatagtgttgtttcaatgttaaatttcctgattttggtaactgtactgtggttatataaataaatgtccttgttcttgggaaataaacatacctaatcatttaggattaaggaacctgatgtctgaaatttagccttaaatgttcagaaatatagaatacgtaatatgaattacataaaataaatatagatttatagatagataaaacaaatgaggcaaatgtttttcatagagtagattgtttaaagacactgtactaggctttaatgtaacgtataaattaacattgatttatgcaaaacaaggctgtgaaagcccacacagcttagctgttcaatatacctgatctcaggtatatgaaagaaagaaggcagacctccctcacttcctttgcaaatttccataggccctttctatggcaggataccaactgccttcttagacattctagaggtccagaggtctctcccaattcattagtctcactgtgaattgtagaaagcatattacagagggtcaataaactttggccaatggtagtgatatttgtaagcaataaaagaaggttgggttgatcagtccgttatagaaatcatatttgataacagtaatcttgctttgtaaatctggcttaatagtttcgagccacaatttaaggctgttcatttatatcatcacctgaagtttagaagataccatggcccacataaaggtaatcattaatatcatctttctgtacatgttcttgtcagagcctgccacgtccatgtcccatttagccttcaaactcacagatgcagattctctttctcagctgaagcacaaggaaaaacagttcagagttatattttaaactaatggtctattgactcctagtaccagttaataggctgggctatctctacttttgctggagaataaaatagtatgaagttaactataatattttcttcttacagcaacaacaaaattctgtaagaaagatcattcccacccaatatggtgctctttaaatggtccacagcttaaaatgtatatgaggtcatatacgcttatatttgcctaaagaaattctggagaatagacccaaaactaataaataaaagtaattaattacctgtgagggctggagagatgaaaattctagagataaaggattttaaaaagtattccctggaagacattttctatttttaaattcatgagctatgtgaatatgttaacgattgagaaagaaaaatccccagctatctaggcagacttcccaaagaggcacctttgactttggaatcatttagctgtagttttctgccctgaaagcctcttttgttatccccggtccatcctgcaggtgtggttgataacagatgtcaaagaataggtgaaattttatgaggttaagtgcaaataatgaatatgaccctctttgcggttcttcctcaatcttctattcaaacataaactcagttcatgaagaatgaagtttgtggcattgctcaagaaaggcaggattcaataaaatctttttagggccaaatggaattttttcaactttaatgattttttctttaattatgttaaaggaagctccagaatctcttttaaaaaagtatttgtagcctgggcaacatggcaaaaccccatctctacaaagaatataaaatattatccagcagtggtagcatgcacctgtagtcccagttacccaggaggctgaggtgggaggatcatctgagcccaggaggtcaaggctgcagtgagccactgcactccagtctgggcgagagcgtgagacctatctcaaaaaagaaatcaaactattttttgtatcgttttgctgattacaatggtaaaatatgtttgttgtagaaactttggaatacataaaaattaaagaggactagttcgttaatacataagtcatagtttaacagggtctaagttagccttccatactttgcccatttacaaagtaaggcataaatttcaattcttttgtaatgtgatggtttatgttttctttagataggatgtgatgtaccaagctgagtgttgggaggaactacagcctctcttttgaaatggaagatcctcggcccaagctataaacatgttagtccaaaattcatctggaattttgttgtttgggatgcaaaacacaatattcccatagaaacaatataaaaattatggctagattctaaggcaaggcaacagatgtccatggaatccagcgactcagagcaccaactgtccaactgtgcttcattttcacagaaaaagggaggctagaacatgtctttacctcaaaaaaagcaaaaacaaagtttatgcaaaaagtattttgttatactgatatgataaatatttaatgagacaaatttttatcaattatttacctaaagtgactttatttcttatttactccattactagcaggtttataagcttttcctctcgcctttattcacaatttctattctgcctttactatttttaatggtttccccattccccagttaactccttggcaaagacagaggatgagtgaaaagcttgtggcctgtagactagatatcagaattgatccacaggaaagaacctcttttcagaagccatctttaccttggggtttgataaagaacataaaagcctcaattggtgctatttaatatttgttccgagaccggtatttgcatttagggtgaaatgacttgatgcacattgtttacagctaactctgaagttcaggggaaggggaataatccactgagtcagaaggcaaatataccagactgatcatgagtaaaacaaagccctggtgatcagctcttcctcttattcactatctgtatctagtgaaaatggtcgcatattttcaagtggatttttaaaagctattctcaatgcttttaaaggttttacaacctcaggggaacaatgcatgcaattgaaccacacaataaacagtaaacaccaattgccccccacaatgaaaagctaatggtctttgagaatactctacaacagaatccacttagcagctactagtctcctgctaatggtcaattcactttcggcaataagaacccaggcaaacggcctcataaattttaaagaacaaagggtacaataaatggactgcaaatcgccgcattctctgtaagcagcactctaaggagtgaaatttccaattgctaatggccagtatattggacaagtggagattttcctactgagggaccagagaagatgacaaaatataatggttttcacaaagaggactagaagctggggaaattaagtccttgggtctgtagcacagtttgagctgtgaaagtcgttatgaccagaagattgtctagccttctctgcggtagcctgggaagctgctatcagattgcttgctgtttgctttaatagtgtatcgagaccagaagcacacacactgctagaaccaaaaatcctggatagatttaacaaaatccaccaacctttcagggaggatacataaaaacatccttttttgcattttgatcttgtgggtacttcagaaatgccatttgattcatgatggtaagtagcctaaacgaatgcaatgatatgtgaattgattaaattctgtatcaaaagggatctctaagaaaggaataataagaacaggaaagtggaaatattgtggaaacatttttgcaatagactgaatacgttttcccaaaattctttcctgcctgcctgcctgcctgcctgcctgccttccttccttccttccttccttccttccttccttccttccttccttccttccttccttcctgtcaggcctctgagcccaagctaagccatcatatcccctgtgacctgcacatacacatccagatagccggttcctgccttaactgatgacattccaccacaaaagaagtgaaaatggcctgttcctgccttaactgatgacattatcttgtgaaagtccttctcctggctcatcctggctcaaaagctcccctactgagcaccttgtgacccccacccctgcccgccagagaacaaccccctttgactgtaattttcctttacctacccaaatcctataaaatggccccacccctatctcccttcgcggactcagcccacctgcacccaggtgaaataaacagccttgttgctcacacgaagcctgtttggtggtctcttcacacggacgtgcatgaaacttccttccttccttctttctttctttctttttttgacagtgtctcactctattgcccaggccggagtgcagtggcatgaccttggctcactgcaacctctgcctcctgagttcaagcaattctcatgcctcagccttcctagtagctgggattacaggcacctgccaccgtgcccagctaattttgtatttttagtagagatggggttttaccatgttggccaggctgctctcaaactcctgatctcaggcgatccgcttgcctcagcctcccaaagtgctgggattacagaccaccatggccagcctgcccccaaattcatatgttgaaatccttccccctaaggtgataagattaggagatggggcctttgggaggtgattagttcatgagggtagacccctcatgaatagtattagtgcccttattataaaagggatcccagagaactctcttgctttctctctaccatatgaagatataatgaaaagactgcagtctgttacccagaagagcactcatcagaacccagtcacgctggcaccttgatgttgaacttccagactccaaaactatgagaaataaatgtctgctgtttatcaaccaccctgtttatagtactttgttatagtagcctgaattgactaagacaattatggagcttgaaagaactgtgagctcctcttatggtcaaaggagctgaaacttaggctttgtcctgaaatttccctctttttttccccctgaatcattaattattaattttccctttctttgatcctcggttaaaaaaaaatcctctcttaaccctatattctgctccagctgtgtctcatttttctgttgtcctttatatcaaaactctccccaaagacttgttatgctttgtcttgacttcctctccttttatctctcttgaacctgcttcactcagacatctgacccaaaactccaccaaaatcgcccttgtcaaatccactaggcaatcttcagtcttcattttattggcaagtcaagagcatttcaaccattggatcactgcctgtttcctgaactgctttcttcacttggctttcatgatagctaatacagagtccaggtagatggcaagtgctttggtttgaaagtatcccctggaagatggagtgttgcaaacttcattgccactgtggtaatgttaaaaggtggggctttctcgaggtgattgggtcatgagggtggagccctcatggtggattaatgccattattgtgggtgtttggcccccttttcctttctgtctctctcacactcttcctctctcactctcaccctttctcacccttccatcttctgccctgccaagggacgactcttcagatgccagtaccacagtcttggacttaccagcttccaaaactgtgagacacaaatttcttttaaaagtaaattacccagtcttgagtattctaagacaaccactaatgactcctgcttccttttccattaagaagagctctttttggggtatagcagcaataggtcttgcatttcccaaacctgtttctccctaggtaggggtaacagaatttgaagtgaggtggttaagaagtgtcttctttactcttccccatctggctccaagtggatgcccagggtgactttggaagcctctgttagcctgggtacctgaataactgtgtggagcagagccccttgtggtgtgtcagatgaacttcagatgtacagcacagcatcagtttctcctgctcattgatgagcatctgcttcagtcttccttattggcaaaccagctgtctttgcttctcagtccacatagtaggcagcctacaaggtagctaactgtagcacctggggtcacatgtttcagccccaaaacatttaatgactgactgaattcctaattctcagaaaagaatctgcttggtccacataagttcaggtgtctacctctggtccaaccagctatgaccagggagatgtccctgaaatatcatcttggtggttggagatctgctctgtgaccttgtgcatcagaacatggggagaggtttcaggagagtttctgtgtgagtgggaaaactattaagtgcctactctacatcccaatatttcactgtttttccctttctctagccccatctcccatccctccacgctccaccccatccactctaaatactcttttactttcttgaatcctcttggtatgtcctgcaactccagtagtcttctctggtcaagtttgcatattttcctatattcagtgcctcagagtcagatcttggaatcctctgacatctccagaccacttgttttctgtccttgtataaagtcatcagctcctttgaggtctacatcatttggctatgcctttctctctcttctctttctgctatctaaccacctcccaggtatccattttcatgcatcaaatattttaccacctgtctcaaagtttcctcttcaatttcagctcctgttctcttccgggtgacttcagctttcacatggcaggtacatcccacaccttgcattctccatgttttgaacgcctctactttatgaccttcttgtcctctccattttagtctaccacatccatggccacacttaaactttattctcatctgaaattgtaccttggaaatcttgaacatcccagtctctaatgacaggtttctgattttgaaattcttgcccttggttcctctcgacagaactgttttcggttttgctctgctccactcttgatttctttccttacccactttagactccatgaactatcatttcaaccactctctttttcaataccctcagctccctttccccttcttccattttaccagctttgaaaatccccaaatctggatgaatacaagaagctgtcctcttcccaccaacccaaatatatgactttatagcagattttttgcctacttaataccccacagaggctctctaatgcctcaggataatgttccaatttaacatggcagcaaagctcctgaagacctggcctctatttatggctccaacttcgtccctcacttcgttttctccactccaactgtactgagctctctcctgtatcttccacacccaaatctctgcactggctttcatacctacctggaaatcttttctcccagctaatgctaagtcttccttcagttcttaacatacacataattttctccttagtctttctcctgaggtttctataactctttctcaaaaatctgcctttagtcgcagtctctgcatcatagagcttgtcacttttatgcaatggtttggttttttcatagactcttgaggaacaaagaggcacggtaccttgtctgttcatcatattcacatttccagcacagattctggatcaaagtaattttttttttcagggtctcactctatcacccaggctggagtgcagtggcgtgatctcagctccctctgccccccaggctccaccccctgggctcaagcgattctctctcctcagcctcctgagtagctgggattacaggcatgcaccacaacacccagctaatttttgtatttgtagtagagatggggttttgccatgctggccagattgttctcgaactcctgacttcaagtgatccactcaccttggcctcccaaagtgctgggattacaggtgtgaaccactgcacccagcccaaagtgagtctttttttttttttttttgagatggaatctcgctctattgcccaggctggagtgcaatggcatgatcttggctcactgcaacctctgcctcccaggttcaagcaattctcctgcctcagcctcccgagtagctgggattacaggcatgcaccaccatgcctggctaattttgtattttttgtagaggtggggtttctccatgttagccaggatggtcttgatctcctgacctcgtgatccacccaccttggcctcccagagtgctgggattacaggtgtgagccactgcgcctggcctccaaagtaagtcttaatgaatattacatagtattcaaatgaatgaatgggtgtagaaggtaggaagataaggttccctcaatgttttttaaagcaatatctgacattgaaaaaattgtacattattattttttattttctctttccttttttttttttttttttttttaatgcagtcttactctatcacccagcctggagtgcagtggtgtgatctcagctcactgcattctcaaccttccaggttcaagtgatcctcccacctcagcctcccaagtagctgggtctactggtgtgcaccatcatgcctggctaattttttttctttttgtctttttagaaacaggggtttcaccatgtggtccaggctggtctgaaactccagagctcaagtgatctgcctgcctcagcctcccaaagtgctgggattacaggcatgagccactgcacccggccattattttcttcttctttttttttttttgagacagaggttcgcttttgtcacccaggctggagtgcaatggtgcgatcttggctcactgcaacttctgcctcccaggtttaagcgaatctcctgcctcagcctcccaagtagctgggattacaggtgcttgtcaccatgcccagctaatttttgtatttttagtagagacggggtttcaccatgttggtcaggctgttgttgaactcctgatctccagtgatccgcctgcctcagcctcccaaagtgctgggattacaggcatgggccactgcacctggcccattattttcttaatatttatgttttgcttcctttcagtagaacagacacacaagaagtaattcttagaaaaatgctgatgagcacctggaggctctgatgtccacactagatgccttagaaaaaagaactatagccattgctattcccatcattgtgctgcacagaggaatgtaggtatccctgggctttacatgtaagggcaaacaggacgtgataaccctccaggatgtgtttgagaagggacatgtgccttgtggagccaagcactccttcctatgctccctccaacaagtttaagaaatatttatttatttatttattttttgagacggagtcttgctctgtcacccaggctggagtgcaatcgtacaatctcggctcagtgcaagctctgcctcccaggttaaattctcctgcctcagcctcccgagtagctgggattacaggtgcccaccaccacgcctggctaattttttgtattttttttagtagagatgggggtttcactatgttggccaggttggtctcgaactcctgacctcatgatccacccgcctcagcctcccaaagtgctgggattacaggcgtgagccaccgcacctggccttattgatttattaatttgttgagcacaggcgagttggacgctaagaatatcaacatagaaaaagcacagaacctgcttcatgggacttattgactagaaacagatgatcagatgagaaaataggcaattacaacatgatgtcatgtgctgtgatagaggtaagcacaggcttccatgggtgccaaggaggaatctctaacccagcctgcaatggtaagggaaagttccccagacgtaatggcaccagaacttagtcttgaaagaacaggaattacagaggagaagtggagatggttgagggcattcccatcaaaaacccagagagggccgaatgtggtggcacctatattttagggtatatcatatatgataagttgtaaagaaaagcaagagaatgattagcataaaatttagagtagcagcctcttttttttttttttttttttgtagagataagagtcttgctatgttatccaggctggtctcaaactcctggcttcaagtgatcctcctgccttggcctcccaaagtgctgggatcacaggtataagccattgcacctggcccagttactatttttaaagtaagaagttggtagaaaactggtacaacttaggacttccatttcctggtgacaattgtccttatcacctcataggtctttgaggaaggttagatgtgatcaacaatgatgtcctgttctgactaaacgttaattgtctagcttcagaggcagagcctgagttaggtccctttctctgtggtcatgagaacctgactcagtgacgttgactcacagaatgtgagcttcatcactagctcttatcaccttgggtctagagggtcagaaatggaagctctcctgcaaaggggggcattgagagttcaagtttctcactagtccaggcaggagtgggtacatgtttactgcagaacagagtaggtgtgacctggcataacagcctaggggtcttcaaagaaagctgggtcttatcttatctcgctagaggaaagccagtctgagtaagggggtggaagagcggtggaccatctagggatccaacaaagtcgcatttcaaagccggatgtgatgccaggcacagtggctcacgcctgttaatcccagcactttgggaggccaggatgagcagatcacttgaggtcaggagtttgagaccagcctgcccaacatggcaaaaccccatctctactaaaaatacaaaaattagccaggcatggtggctggtgcctgtaaccccagctacttgggagggtgaggcagaagaatcatttgaaccccagaagaagaggtgggggttgcagtgagccaagatcgcgccactgttctccagcctaggggacaaagtgagactttgtctcaaaaaataaataaataaaaaataaaaaagctgaatgtgttttggcagggtctaatcactcattcctctaagaggcatcagaggcccattatcaagacaggtggaaagtgctttgaaacatgtttaataaattacttatccagcacttagctagtccctgctacatgccaaggctctttacaaatattagcccgtgtaatcctcataacaaacctatgaggtgggtaatattattatcctcatttcaagaggaaggtatttgcctgaggggatacagtgaatatgggagatggaacgtgggcccagaagcccagctccagatccaggttcatcaccaccatgctgagctgcctggttggtctctagaagctctcacaatacctgtggctgacccacagctccagtttgcatgggcagagggaaaggattagcccagcttcctgggccagtgtgtaggtgctggcttgtctttgtagaatttaactattggctaggagccaatggcaggatttgcatgacccaaagaccagcccaaaatgaatgacgctggtggcctttgtgctaggaggactgtctcgccttcttagtacagactttctacaacagcgctggggacaaaatcacaggaaagtacaagaagcagggtggaaacgtgcattcaaatgataaactggctgaaggatctagtgagtctgctagaagagcaagggtcaagaacagcttgcagccttgaccatcgtgggcaagtctttccatgtcctcgcctgtgaaatgaaaagttacaccaggagttcccaagcatggctctgcctctgaattccctggagagagagaggaaaaaatataggcttctcatcccaacctgtgcaattctgacttatatagaaaactagacacaattctggagtagtttattccccaatgattctagattatcaagtttttagcatgtaggaggctcataagaaatatagagttctgcattactgtgaggtttggcttcatttcagaatttaaaagagcaggacacggtggctcacaactgtaatcccaacactttgggaggccaaggcaggcagatcgctagagttcaggagtttgaggccaacctgggcaatatatcataacctcgcctctactaaaaaaaattaaaaactagctgattttggtggctgacgcttatggtcccagctacccaagagactgaggtggaaggacggcttgagcctgggaggttgaggctgcaataagctgtgatctcaccactgcactctaacatgggcaacagagcaaggccctatctaaaaaaaaaaaagaaaaaagaaaaagaaaaagaattcctaccaaaatgccaaaaactccaatatgtataggagtcgacgtgacaaagttggttagggacaaataaaaacctagatcccccttctcttataaaaataaatgatttaaaattttattttttattttttgtatttttttgagacagagtcttgctctgtcgcccaggctggagtgcagtggtggaatctcggctcactgcaacctctgcctcctgggttccggtgattcccccgcctcagcctcccaagtagctgggatgcccctgccatcccatctggctaattttttttgtatttttagtagagacaggatttcaccatgttggccaggctggtcttgaactcctgacctcaggtgatccacctgccttggcttcccaaagtgctgggattacaggcatgagccactgtgcctggccctgatttaaaattttcaatgtgaaggaaaagcccttagagcagacaggatgccagacactgcatccccgtctttgaactctataacaactctgtgttatgttcagcctcttcccattgtataggtgaaaagtgaaattcggaaaaaatgactatttgctaatgatcgcaaagctcataaagttctgccagacactggatttatacatttccataaaagctatccatgtgttcattcaggtatttgcttatttgcaaataaataaatattcgtttattcagcaaatatttactgagtcctatgcttttcttaacactgagaacacaaaaatatacagactgcactatatacaagtataaggatatcacatgtaccccccaaatatagacaactattatttatcaatttaaaaaatttaggcagaataaaatattcatgccaaataataagtttagcctcttaatccatccttccttccctttcttgcttgctttcttgctttcttttatttctttttatttatttatttatttttgagacagtttcgctctgtcacccaggctggagtgcagtggcatgatctctgcttatgtaacctctgcctcccgggttcaagcaattctcctgtctcagcctcccaagtagctgggactacaggtgcccaccaccatgctcagctaatttttgtatttttaatagagacggggtttcatatattggccaggctggtgttaaactcctgaccttgtgatccacccacctcggcctcccaaagtgctgggattacaggtgtgagccacagtgctcggcctatttctttttttttgagacagggtctcactccattgcccaggctggagtgtagtggcgcatactctgctcactgcaacctccgcctcctgggctcaagcaatcctcccacctcagcctcctgagtagctgggactacaggcttgttccaccattcccggctaatttttgcattttttgtagagacagggtttctccatgttggccaggctggtctcaaactattggcctcaagcgatccacctgcctcagcctcccaaagtgctcggactacaggtgtgagccaccatgcctggctagctcatttcaaaatattcccagtctttccaaaattaggaagccctgaggggtatagaaaagatccaaactccccacaaattaactttgataaatccttgactgtctactactaataatcttatttttgctaagaacatcttttctcagtccacaaccagaaaacattcctttgacaacttttatggctattaatattgaaggaaatattgaaaaagagtcctagaataagtaaaattcagttttaagaaaaagagagaggcaattataacggacattcatgcttcataaaacttttcttttattattattattattattattattattactattattattatttttgcgacagagtcttgctctgtcgcccaggctgtaatgaaagcatcacaatcttggctcactgcaaactctacctgcagggttcaagtgatgatggtgcttcagcctcctaagtagctggaatttacaggtgtgtgcctccacgccaggctaatttttatgtttttagtagagacagggtttcactgtgttggccaggctggtctcgaactcctgacctcaagtgatccccctgcctccgcctcccaaagtgctgggattacgggcgtgagccactgtgcctgtccccagcacaaaaagttctgatagctccatgttcctttataatcttgaacgataatacataattttacaaaactgtcattagtgtgcatacaatttggtgatattttaaatgaaacacattttcaccagcagttttctaaggtgtggcagaatacgcaagtgttttgcttttgatactatacaatgttgttgggcacaatcacttaaaaaacatactgacccatgaagtttagctcttggagtttccttagagaatattcggaccaaatgtactattgtgtgcttgaggaagctgaagactagaacttgcccacacctcttgtggggctcattccctgcacactgcttctgaagagagcatgagagcctggtgagtttgacttccctgaactaggcctgaagctaaaggtatggtatggagacaaggtaaggaatttcagtggtgagagttccaggatcatccatgctgtggctctgcagctcttgctgcaaattcccagttcatttagataagaaaacaggagtggaacaggtgagatgtccacacagggtcaggatccatggcagaagcagaatatctttgtgcaccttttcctgggtgcccttcaaggtatgtaacagttgttagatgaagggagaagttcttcgttggtcaggaacttcattctctctaacctcaactgtatctgaagactctcaacatcatggaattgtagttagaggagatgttggaatcatggcgggaggagcaggtagctctgtggtttccaaaagccactgtagaggatcaatcagcaggtttggggtggagccccagaatctagagtctaactttcaaaagctctttaagtgattctgatgagaaactggttaggaaaacagtgaagtagaccaccctctcacctaggcagggagtcacttccattcagtggaaagcccatgaggatgtgaggaggacttaaatatttccaatgacagagaactcaagtttctgaaacttactcccagtgggaattcccccaccccatatgaaaaaaaaaaaatttcctttcattccagtttatctatggccagtagttgtttgaaaggaatttatacctctgcaaagaagtcactaaaaactgtcttacaaatactaaaatctactccttgaatcaatttagcaaaatgctttgacctgataactccatttttgggatattatcctaaggaaataatcaaaaatatttttaaaaagaaatcctttatgaacagttttgtttattgcaccattattcatactagagcaaagaacaacaatgacagctcaattagagacctgttaggtaattggagaatggttaaataatctttggcatgtcaactcaatgaaatattgtgtgaccacttaaaaggatttgacagagtttgaaactatgtgaaaaattgcttctgttaccctaagtgagccatgattgcatcactgcactccatcctgagtggcagagcaagaccctgtttcaaaaaataaataaataaaataaaatacaataattaaaaagcaagacataaatttgagaccaggtccagtggctcacacctgcaatcccagcactttgggagctgaggtaggaggatcatttgaggccaggagttcaagaccagcctgggaaacatactaagaccccctcaccgtctctatttaaaaaaaaaaaaaaaacaaaaaaaaaaacgggtgtggtggtttatgcctatagtcccagctactcaggaggctgagatgggaggattgcttgagaccaagagttacaggttacagtgagctctggttgcaccactgcactccagcctgggtgacaaagtgagactctgtctcataaagaaactttaaaaatcaccaagatgatgagactttaatagaactttagagtattccatttagaaatgatgtcctagctgggcacagtggctcacgcctataatcccagcactttgggaggcagaggcgggcagatccagaggtcaggagtttgataccagcctggccaacatggtgaaaccccatctctactaaaaatacaaaaattagcagggcatggtggcacacgcctataatcccagctactcaagaggctgaggcaggagtattgcttgaacctgggaggcagaggttgcagtgagccgagatcgcgccactgcactccatcctgggcgacagagtgagactctgtttcaaaaaaaaaaaacaaaaaaccagaaatgatgtcctagacaatacatgtacactgagatgagaaaatcatgaaaatgccaaagtgttagaagagaagataatctagatcagtggatcctgatttgactgcccattggaattacctggtgagtggttataaatcttgatgcctggccacacctaaacaatcaaatccatagaaatttttaaataaaaaaaaaatttgaacaaaacatatgatagaaattttgtaaaataaatacaactccataaaggaaggaagttcttccttcctttctttcaatttctttcctttgaaaagaaatcaaaatataaaagtggttgatttgaatgacagggatgtaggcaattaatttttatcttcaagggcttttttcccaagtttatttgctaaccattgctcagataataaaaattatataacaagcagttaataaaatgtttcattggctcagtattgccatgtagaaaaattccaactttaataaaatataccttaatttattatttaattaagggtgtggtatgagcccttccagtgaccagcttccgctgaaactcacatcctaccctctcaaccttgctgatctgctctctgtgctttcttgctcctctcgtttcttttgttttgttttgtgtgttttgttgttgttgttgttgttgttttgcttgtttttttttttttttttttgagacagagtctcgctctgttgcccaggctggagtgcagtggtgccatctcagctcactgcaacctccgcctcccgggttaagcaactcttgtgcctcagcctcccgagtagctgagactataggcacctgccatgacacccagctaatttaaaaaatatctttagtaaagacaagattttgccatgttggccaggctggtctcgaactcctggcctcaagtgatccacctgcctcggcctctcaaagtgctgggattacaggtgtgagcccccatgcctggccaggaacattgttaaaagcccagcttacagagcccaggatcacagagccagcctaagattgaagctagaccagggcaacagagaaccccttcctaacccccaccatgagcctaacagcatgtaccaagcaataatagtctacaactaggggaaggacaaaggcaagcagaaaggtcctctctgtggctcagttggcagagatagctacaagatgaaggtggggcaagaatatcccctcacctcccacctgaatcacaacacaagcgaggagaatttgaagctggtttgtgcactgaaggaaaccatagcaacaacaaacccaaacctactcaactcctgactagactgattcaaccctccacattaatgacctgtcataaaaggtgtgcccatttcagacataaataccacttacttcagtgtctactgtcctacaaatgatgccaggtattcaatacaaagttatgacatatcaaggaaacattaaaaacaaaaagcaacaaacaaaatcccaagagataaagcaatcaatagcaagagattgatctatgagcaacattttgaaactatcaagcaaggaattaaaaataattaggattaatggattaaaatatctgataattaaaaatgaacaacaaacatgaaccgatgggtaatttcagcaaagagatggaaattataagaaagtcaagaaggaacatcttcaaaacagcaaacaaggaactccaaaaattcactactccattaaagcaatgagaacattgtcaaaataaacttttacaactgtgaaaattaactaaaggcttgcaacatgctgagaactgaaaatattgagaagcacttatttaagaaaaatggctgaggctgggtgcgatggctcacgcctgtaatcccagcagtttgggaggccaaggtaggtggtttacttgaggccaggagtttaagaccagcttggccaacatggtgaaactcagtctctactaaaaatacaaaaaagaaagagaaggaaggaaggaaagaaggaaggaaggaagggagggaagagagagagaaagaaagaaagagagaaagagagagagaaagaaagaaaagaaaagaaaggaaaagaaaagaaaagaaaaaagaaaagaaaagaatagtcgggcatggtggtgcactcctataatcccagctacttgggtggctgaggcaggagaatagcttgaacctgggaggtgcaggttgcagggactcgagatcacatcactgcactcagtgcaatgagatgtctgttttggtaccagtctgtgcactacacaaggcaatgagatgacattcaaaatgttaaaagaaagattgtcaaccaagaattctatatcagcaaaccttcaaaaaacaaaggagtaattaagacatttacagatgaacaaaaactgagagaagtcatctttagcagacttgccctacaagaaattctgaaaggaatccttcagcataaaatgagagaaccctacatgttaaatccacatgaagaaataaaaagtatggtaaaggtaactacataggtaaatgtaaaagacagcagaaaagtgtttttatttgtaacccctttcttttcctctcttatttaaaagacaactgcatacagtaataattataaaactatgttgatttgtaatgattatgaaccaactataaaccaactatgttggtttataatgtatagttagtatgacaaaaatcgcacaaaagtggtatgagagaatgaagttatattgcagcaaaatgtttgtatactgttgaaattaagttggtattaatccaaactatattattttaaattaatatattaattgtattccacagggaaaccaccaaaacaataactaaaaacatatagtaaaagaaacaaagggattaaaattgtatactagataatagccattaaacaaaagaaagcagtaatgtaggaataggaaataaaaaatatataagacatagaaaaagaatagcaaaatggcacacaaatttaagaatgaaagactaaacgttttccccttaagactaggaataacaccaggatgtccactctcaacacttctatttaacattgtactgaagtttctagtcagggcatttggtcaagaaaaataaataaaggaacctagattacaaaggaaataaaatgatctctatttacagataataagattttgtatatagaaaatcctaagaaacctaaaaaagaacttattagaactaataaacagttaagcagggttacaagatacagggtcaatacacaaaaagaaaatatattgctatacattaataataaataactcaaaaaaataaaactaaggaaacaatttaatttacaatagcatcaaaaaagaataatatacttagtgataaatttaacaaaagaagtgcataacttggacattgaaaactgtaacacgtcatagaaagaaattaaagaaggcctaaataaatggaaagaaacccatatttgtggattgaaagactcaatattgttaagacggcaatcctccctaaattgatctacagattcaatgcaatgcctttcaaaattccagttggctgtttttttcttttccttgcagaaaatgacaagctgagtctaagattcatatgaaaatgtgatatggttaggctttgtgtccccacccaaatcttatcttgaattgtaatccccataatccccacgtgtcaagggagagaccaggtggcagtaactgaatcatgggagtggcttctcccctgctattcttgtgatagtgaatgagttctcacaagatttgatggttttataatgagctcttcccccttcactcagcacttctccttgctgctgctttgtgaagatgtcttgcttcccctttgcctcatgccattattatgagtttcttgaggcctccccagccatgcagaactgtgagtcaatgaaaactccttcctttgtatgggttcatgtcctttgtagggaaatggatgaagctggaaaccatcattctcagcaaactatagcaaggacaaaaaaccaaacaccgcatgttctcactcataggtgggaattgaacaatgagaactcttggacacaggaaggggaacatcacacaccagggcctgtcatgaggtggggagagtggggagggatagcattaggagatatacctaatgtaaatgacgagttaatgggtgcagcacaccaacatggcacatgtatacatatgtaacaaacctgcacgttgtgcacatgtaccctagaacttaaagtatataaaaaaaaacaaaaaacctctttcctttgtaaattacccagtccccagtctcaggcagttcttcgtagcagtgtgaaaatggactaataaaaaatgcaaaggatccagaatagccaaagcaatcttgaaaaagaaacaaagttggaaaactcacaccttcagatttcaaagcttacaaagttacagttatcaagacagtgtggtactagcataaggataggcatatgggtcaatggaatagagttgagaattcataagcaaattcatatttatttatttattgagatggagtttcattcttgtcacccaggctggagtgcaatggtgtgatctcagctcactgcaacctctgcctcccaggttcaagctattctcctgcctcagcctcccaggtagctgggattacagggacccacgaccaagcctggctaattgttgtatttttagtagaaacagagtttcaccatgttggccaggctggtttcaaactcctgacttcaggtgatccacctgccttggcctcccaaagtgctgggattacaggtgagagccagcatgcctggccaaattcatacatttatgaatttgatttgtaccaagacaatccagtgggaaaagaataggcttttaacaaatggtgttgggacaactggctatccacatgcaaaaagaatcaagttggacttcttccttatgccattttaaataaactcaaaatgaagcatagacctaaataaaagagctgaaactacaaaaccttttgaagaaaacaggtatgaatatttgtaaccttgaattaggtaattgcttcttagctatgacacctgaagcataagcaaccatggaaaaagaaggactgctagtttattttctcattgatttgtgggggggtccatgtatctagggaaacaatccttttctcagttttaggaattgcaaatatcttcgaccgttctgttatctctcattaattttgtccatgattatccttttttgatcttaaatatttatctttgccttgtggcttatgctcttaaagttttgctaaaagtgtcttttttcatccttaggtgacaaatatatttttctatatttccttctgttaagttggcggttttatctttcatgttcaagccaataatccatctaaaatccaccttttcatgtattttcatttagggatccagattcatttttctccatacagtgaatttgtttccctcaaagtgtataccatataatcatttccccattgttgtatggacccctctttatcataaattaagtttcaatatgtaaataggtctattcctgagttcctatactgttccatagatctatgtttgttcttacaacaatattttaaaaaaattaataaggctattagaaaagtaggactagaaggacattttctttttctttttttaattttatttatttatttatttatttattttgagatggagtctcgctctgtcgcccaggctggagtgaagtggagtgatctcggcctactgcaacctccacctcccagggtcaagcaattatctgcctcagcctcccgagtagctggacttacaggcatgcaccaccaaacctggctaatttttttgtactattagtagagatggggtttcaccatgttttccaggttggtctcgaactcctgacttcaggtgatccacccgtctcggtcttgcaaagtgttgggattacagacgtgagtcattgttcccggccagctacacttatttcaaaacaaaaaaggtagctttttttaagtccatgagcagcagaatcaatatcaagtagaatggtgacagcctgcccttcaagacatatttatttattcttgctagaaatgagtatataagttgctatggtgatggttgtcaactggaccacagagctggactggaccttcaatggggtgaaaagtaggtaacccctgctgcctgtgagaggtaagacatccagcatctcatcaaactgatgctaaagaaagattttctgctccctgtaacataaaaggattttactgcatgggtatatcagtaagtgcatttaggtcaacaaacagttctactcaacaaccacacaatatgtagagcttgctcaagcaaattgtgtgataaccatgtgcttttatagacaatgtaagtcattgctacatattatttgtaatgattgttggcttgtttagtgcggttccaggtcttttaatcccttcacatatgaccccaaatttgagaagtctgtcagatatccaagtggtgatatctggtggacagtaggatgtcagtctggtgcttgccagagaggaaactatgagtttgaccgtggtcaattctatatcttcctgggactggaagagatcacttagaggaggagtgtggatatagagaaggagaaggatgaagacaaaagtcctcaagaacatcaatatttagaggttgaggagccaaagaggaattagtcaaggaaaaaaggccagtgtggtgggaggagagtcacagggcctgaaagtgttttgagaatgaaggagaactcaagtgtgtctatcgctgctggcagatctagttaggtgaagatggagaactgtctttgacatgggtcaccctgtagtatgataataactctaagaagtgccattttgattgaatggtggacactgcaaaagctcagttggagagggttcaagagcccatgggaggtggaaagtgggcaggcaaaagagggagtggctggagtgaatcaagagagaatactttttaaagacatatgaaatcaaatcatgtttatttgccaatgggaataatttggttgaggggacaatcaatatggcatgaatgaaggggatatttgcaagggcagagttcttgagagcagaaggagattgaaactcaaagcacaagtggaggagtggccttcatccctaccaagagagaaggtggattttgcaggtacaagcccaggtaaggtgatagatgcgatggtagggatggaatggttcttttttgactgtccacctttctatgatatattgggcaatgctgttggctgagatgggtggtggggggggcaggtgagggtgataaacatgattagatttcatatgtctttaaggaagtgtggaataagcatcccagaaagtaagaggggaatgttttcaggaattgtaagtggagtgacagacattcctaggtgtcatgtgagagttgtggtcataattttgaagtaaaccaagttggattggtttgtatgattttttaaaagtattcatctgtttaggtgtgggtagagtcaagaaacagtagagctagatcagggtttggtgtttcctaggtgtatcaattaggatgtttttcattgtgagtaacagaaaacctctctcaagccaccttcaacaataagaaaatgaattattgaacttaaaagaaggttcagacgtaggtcaagctccagggttgttgattcagtggccccgtgagttcatcaaggactcaggttctttttccctctacttggctgtctatggaattggctgcttctcgtggcttgcaccctgctcttgtgatgcagtggctgggggcagtcagtctacctctacccgcttcctcattcatgtggagcaaaagagagggaaaccctctcatgctctcaccagccagggaagacagggcatttccttcaggcattaacagttaccatgggaatgccatgtgctggtggcttcagtctggtcctcctgaatcagtcattggcaagcaccaagggatttctaggatggatttagaccagtggttctcaaagtgtgatttttggaccggcagcatccgcctcacctgggaacttgtttgtttaaaattcaaattcttgggcctcactctagatctattatatcagaaattctggggggtggggccctacagtcagtattttaacaagccccccaagcaattctgatgcacggcaaagcttgagaactaatggcttaggataagacagtgaatgccatgaacaaaatgagggatctttgaggaaggaggatatggcaataaacatctactagtggctactagaccaggtgggcacctgagagaaggctcacagagttcagggtgcctgcgatgcagacattctagggaagggctccaaaacaagggttagaagaaaaatgaagacacagaggaacaatggatccggtaaaagtggtgaaattagtagactggtgatcacaatgaagctggagaattgcaatgagttagcaggatagaagacgtgatggccacacagatgaactcacagaactccaactgcatgtctgaaccaaggtcacactgactattcactgctctcagccaacaaatgagggtggcaagaatgctaaggcctaagcttcattcagggccacacgctcttcagatggttgactttggctcaaggaccaccaccaactccccatcacctgactttggtgagccttctttagactgcatgttctgtttctttgtttgtttgtttttggaaacagagtctcactctgtcacccagactgaagtgcagtggcatgatctctgctcactacaacctctacctcccagcttcaagcaattcttctgcctcagcctcctgctgggattacaggcatcctccaccacaccaagttacattttgtatttttagtagagatggggtttcaccatgttggccaggctggtctcaaactcctgacctcaggtgatctgcctcccaaagtgctggattacaggtgtgagcccccatgcccggccctgcatggtgttctaagaatcttccatccaaccttctctctcattctccttcactcatggttagacttgtatcacagttcagcagcactgccatatttacccaactccgtccctaatttttttctcacagaggcacttccccttttaatatttttggcatctgcttcttgggagaatgtagactaatatggaagtttcctgagtagagtttgaaaatgagattgtgtgtcaggtactgtgctatgcatggagtatggtagggtggtctctgccttgctagagcaccactgaggaatacagatgtataaccagtcactgcaggacagcatagtaaggcatcatggggcagtcccagctgctggagttgacgtgggcatgcttagggatggtggaaagatgatgatactgttggtagggtggatatcctgccaactgatagcacacccattagtttagggaaagacctggtgttcagttgctagcctctcaaagagttgtccccacaaacacgtgtgtaagtatagctcaatgactacactgaaaggatatagtctcaatgaatgtcattggttcctacaggcatgataagacaatttctatcattattcctgatatggtttggctgtgtccccacccaaatctccaactgtagctcccataatccccacgtgtcacaggagggacccagtgggaggtaattgaatcatgagggcagttttttcccatgctgttctcatgatagtgaataagtctcatgagatctgatggttttataaagggaagtttccctgcacatgctctctcttttgcctgccaccatgtaagatgtgactttgctcctttcccttccaccatgattgtgagggctcgtcaaccacatggaactgtgagcccattaaacctctttttctttataaattacgcagtctcaggtatatctttattagcagcatgagaacagactgatacaatttcctttcccatggccttcagaaaatagatggatgacttcacggatgttgaggagagaggcaaatactttataacggtttgctttttgtgacaaagtctttgttttctgcctgcctttctctaacatttcccctagtgactgtcaacccacaatgagtggttctttccctactgactgcactaggtagttgtgagggaccatgagataaagccccaagctcccttaacaacagtaagctgctctcccatgcagagtccttattccatctccaactcaggcctggctacaggcacctgaggaaaggagtgtgctccagtctcctgggctccacacacttccattctgaagggaatgttgggtcccttttggatttttatcctgaaattcaagatccatgaatggattcgagggaggctaaatctcctggaattatgtgtacatttcttcacacaatttttttgtatacaatttgcaacacagtttttttttgtcatttttgtatgtttatgacatgttaggggcataaaaagggatggggtccatagttttttattatttctcaagtttgtgacctcaaaaaatattgagtcagtctttttttttttttttcagatgagtcttgctctgttgcccaggctggagtgcagtggcacaaccttggttcactgcaacctctgcctgctgggttcaagcaattctcctgcctcagcctcctgagtacctggcattacaggcacccaccaccattcccggctaattttttttgtatttttagtagagacagggtttcactgtgttggtcagactggttttgaactcctgacctcaagtgatccacccacctcggcctcccaaagtgctaggattacagatgtgagccaccccacccggcccagtcactttttttttttaagagaaaaatactcaagcctttatagggtgtctagatgaaaaactgcctttaaagggtatctgttgttgtagttatccattttaattttaatattattattctactttattttatattttagtttagacaggggcacactctgtcacccaggctggagtgcagtggtgccatcatggctcactgcagcctcaacctcccaggcagaagtgatcctcccatatcagcctcccaagtagctgggaccacaggtgtacaccatcatgcccagctaatttttaaattattttctgtagagatggaatctccctatgtttcccaggctggtacgcctccattttagattaaaagaaaggtccctttttctttgtggtgatataagaaatactgtattatggaattttgtgggataataataaaagggggctggtatatggaacaaaaggaaattaattttgtaccttaataaatctatgtcataagagaattttaacctccatagaacactgtcttggaaaccgaaaactaaaaagaagaaaaacatcataatttttcttttttaaaaattctcttttctttctttgttctttttttccttccttcctcactccctccctctctctttctttctggttaatcttaggcctagttatttccagattaacaggcaaaagtcttcattagagttatagttacaacatgaaaattacaggacaaacttaactgtgttacaaaaatgccaaacgcagatggaagtgtgcaattcttgtctgtctgaactttccctcattcaccacgagagggagcgccacaccacagggacagctcccttcactgcctgcatagctgtcttaatggtctgctatgtcgtgaacattttgcaacgtatgcacagaggtcagcaaaatcatggaagaacagggccttgctgattggtatacatgtcatgaggggccccagcagacctcagctctgtgttcaggtcaagaagctgcaggtgacccgagacacagcagctcctaaccacgccctgatgtgcagcctgcgtgctgctgcggggcaggtcctgaggcctccatcaactcatcttttctagaatgacaaagtgaaactcagttccttcctctacaggtgacaaagcaggtagagtaatcgatgagctaataagtgagtagacatgctaaagcatttatgagatctattatgatctcctgtgaatgataggaaagatgctatagatgagaagctgacatcaggttcagttatttttattcacaattttctatcaccagctctgtgctggtgattgtatttgaagtgtatggtctcaggtattgatgacagctggagggagatccttggaggctggccttcaggctcttttggtttttattgtttttaattgtggtcaaatatacataaaaataaccccttttaaacgtgcagctctgtggcactgtgtacattcacgttattgtgcaaccatcactacagtttatctacaaacccttttcatcttctcagatggaaacacggtacccataaaccaacaactccccattctcctctcctcccagtccttggtaacttctgttctactttgtgtctctgactctatgaatttaccttttctattctaggtaccccttataaagggaatcatgcaatatttgtctttttaaatctgggggatttcactcagcatgtcttcaagattcatccatgtggcatatatcaaaatgtcactcctaaatgtggtatatatgtaaggagttattatttatattgtatatattccacacaatgggatattagccataaaaaaaagaaatcctgtcctttgcagccacattgaaggaactggaggtcattatgttcagtgaaataagccaagcacagaaaagcaagtgtggcatgttcttacacatatatgggaactaaaaatcctggatgtcataaagacagagagtagattggtggttaccaaatgctggaaagagtaggagaaagatggggatgaagagaagttgattaattggtacgaatgtttagttaaatagaagaagtaaggcttagtgttcaatagagcagtagggtgatgatacttaacaataatctgttgtatatttcaaaatagctgtaagagaataattcaagtgttcctagcataaagaaaagataaggcctgttgcagtggctcacgcctgtaatcccagcactttgggaggccgaggcaggcagatcacgaggtcaagagatcgaggccatcctggctaacacggtgaaaccccgtctctactaaaaatacaaaaaaattagctgggcctggtggccggtgcctgtagtcccagctactcgggaggctgaggtagaagaatggcatgaacccgggaggtggagcttgcagtgagccaagattgccactgcactccagcctaggtgacagaacgagactccatctcaaaaaaaaaaaaaaaaaaaaagaaaagataaatatttaaagtggtgaatgtgccaattaccctgatttgatctttacacattatatgactgcatataatgtgtatatataatatataatgtatatagacatgtactccaaaaatatgtacatctattatgtatccataaacttaaaaaaaagtctctgttgtttaagcaaaaaaaaaaaatggttgttcatttttaaggcgaatagtattccactgtatgtatgtcttaatgtgtttagtgttataacagaatacctgattctgggtaatttattctaaaaagaggtttatttagctcatagttctacagatcaggaagttcaagggcatggtgctgatttttggtgatggcttccatgctgtgttataacatggcagaaggtcaaagcgggagcaggtgtgttcaatatcacaagagcagtgatatcactttataagaactcccaggccgggcacagtggctcacgcctgtaatctcagcactttgcgaggctgaagcatgaggtcaggagttcaagagcagcctggccaatatggtgaaaccctatctctactaaaaatacaaaaaaacaaaaattagccaggcatggtggcacacacctgtagtcccagctattcaggaggctaaggcaggaggatcgcttggaggttgcagtgagccgagatcgcaccattgcactccagcctaggtgacagagcaagactccatctaaaaaaaaaaaaaaaaaaaagaactcccacttccaggagctaatccattcctgagcaggtgagagctctctctcatacctgtgagtgagacaacattaatctattcgtgacgatggggacccatgaaccaaacacctcccactaggctccacctcccaacactgccatgttgggaatcaaatttcaacatgagttttaggtagggataaatcacatcaaaatcatagcagtatacaccacattttgtttatccattcattctttgatggacatttgggttgcttctggcttttggctattgtgagtaatgctgcaaagaatattaatatacaaatatctgttccagtccctgctttcaattcttttgggtgtatacccagaaatatagcacctgataattctgtgttgaatttttttgagaaactaccatactgttttcctcagtgactgcaccattctgcattcccactagcaatgcacaagggttctaatttttccacatccttgccaacacttattgttttcttattttctctttttcagaatagccatcctactgggtgtgaaatagccatcctaatgggtgtgatttgtcttgttcaacagttttatcagtgatttagatggaaacaaagaaaagttgcttatctgatttgttgagcaaaggaaggtagaagccgatgtgttatatgacagaactgtgaaccaaaataaagttgctcacttacacaggggttgacaaactatagcctatgggagaatctggctcgctgcctgtttttataaacgaagttttattggaacatatctaccttcatttgttcatggatgtctatggctgctttgcgctgtaatggaagaattggttacttgagacagagactgcatgacctataaagcctaaaacatttattatttggcccttttcagaaaaagtttgttgacttctggattatatgtcttttaaaattctatttatttattttttattttattttattttatttatctatttgagatggagtctcgctctgttacccaggctggagtgcagtggcacgatctcagctcactgccacctctgcctcccaggttcaagcaattctcctgcctcagcctcccaagtagatgagactacaggtcaccaccacgcctacctaatttttgtatttttagtagaaacggggtttcaccatgttggccaggctggtctctaactcctgacctcaggtgatccacccatctcggcctcccaaagtgctagaattacaggcatgagccaacatgctcagtctgggttatatgaaagagacaaatttaaccagaaaatatttaatctctataagtataaaatatttgtatgtaagtaattaaaacaacaaagaattgggaactagctgggcgcagtggctcacgcctataatcgtagcattttggaaggctgagggaggaggattgcttgagctcagaagtttgagaccagcctgggcaacgtattgagacctcatctctaaaaaaaaaaaagagagtcaatggctttctatcatgtaaaaagagacatggtgttttgttttgttttttaacagtagactaaatatgactcaatattgactttagtgttgattgtaattttataccacattaacaggaataagcatctataacagtgattctcaactttggctgcacatggaaatcacctagaagatttaaaaatactgatgtcaaatccctggggaatctgatgtaaacgggctgggtgtggcctgggtatcagagattttaaagcttctcaagtgattcagtgtgcagttgtgacattccccctctgctggactcaggcccagtctcacctacagcttcattccatatgtcccattttatttattttttatttttattttttgagacagggtctcacactgttgcccaggctggagtgcagtggtgcaatcatagctcactatagccttgacttccagggcccacacctcagcctcccgagtagctgagaccacaggtgtgcgccaccatgcctggctaatttttttgaatttttgtagagatgagatctcactatgttgcccaagctgatcttgaactcctggtctcgagcaaccctcttgccttggtttcccaaagtgctgggattataggcgtgaaccaccatgcatggctgtgtcccattttaaaggaaataaagacaagctggttccttttcaaggaggaggagtcagaattgttgggggggaaaaaacaggaattcatttttataagaggaacaattgcagaaagtacaagtgtgaggatcctggagtgagatgtttctagctggcattctgcgtttgagggctgcctcatagaagaggggcctgactgcttttgtatgacatgacccaaggatacaagctgggagcggggagtagaactgccccgctattattatgacttttctttgaaaacagtacgatccaaagagggatagtgccagagggtccacccatcccccagatcaccaacaggggtaccatggagcaggtccgggagtggaacacctgatagtaatggtcaagatagcccaatcccaatggtgcgtatctattggtgctttctcatgccaggcaccatgcccagacactgcgttttctgacttgtgagttcacaccatttccacggggagggggctatgatttttccaggtcatatttgaggaagcagaggttctgaggcttgtcctggttcatgtgtggtggcagagctaggacccatttgcaagaattaaatctgtccacagagaatgcatattgccaacactgagggatttatgaagaaggaacttttgcttccaaattgtttgatgaatggttttccagcctgggctcctctgattctagaaaatacaatgtgtaaataactgaaaatatgaggctgagttttcacaaaaatgaggttgtattgaaaccaaatcctccagcagtgacctatgcagatgagaggtgggattcaaagcagtctccttagaaaacttgatccttagaatctggcatgtcagggctccaaggaaggcaagggatgatctagtccacacccatctcccaatttacagatgaagaaacaagtccagaaagggtctggagacttgtcctggactacgtatttaatatttagaaaatggtgttcttccttttgctgccttaatcaaacagtcctacccttactcaaaacagtgctggggctcggctcatctcagagtccatgcggcaggaaccggagagaatcaatcccttcacttagtggtacattttgactttgattcaaaacaacattactgagcactccgcactcgtttcatgttccagtcttaactctgaatgacttgtgactatctgcaacaattaaatcagcccagaaagaatgcagattgtcaccactgagggattgacaaagaaagaacttttgcttccaaattgcttgaaaagtaatttccaaagaagagttgccaaggagctgttgtgcacatcagtgtcacggacagggcattcctgcccaccagcccagggcaacttcactggagagtccagcaggccctgctgggtgcattctggtatgcgtgccacaaatcagccactgaatagctttcacagaagctgccccccaagagagaagctctcctctgggaagaagctgccaggctggggtgacatttctcagcaccccacccccatctacccactcagatcttgcatctaggtttccagcagtgtaaccaatgagtagaagggctgcacgtgacttctggggcaaaggtaagtaggagaaaggtgcaccttctcttctcctgctcatttcccatcaaggagctgcatgcaaatacctcctatgccccagggagcgagtgccacaagagggaaagaacctgggtcagaaccagttttatactttagctgaacaagaaataaacttttatctcttaaacctttgaactatggaggttttacagcaggtagcatagccctaatgtggccgcccaagtcagattttaccaaaacctaaacagagacacaggctaacatggtgcctgctacactaacagcattcaataaatgtgttggtgagtaaataaatgaatctcaaggatgtgattaatggtttatttagtcaaaaggaagttaaagaatgctaataaatgacttttcggttgcagagtgtattttgctacatgctgacccctggttttcccagctgcactcaggaataaatgaggggaaattaattgtaatttctatgaagagacagccacacccaggaatggatttctgaatcaaataaggtcattttaatgcatggagagctcagaaaacagagtaaggagctcctctattaggtgaatttagggttctttgctggcttgtgggtgtggacatagagccatgtccatatactgtgtcattgccttgaaatgctgtctcctgtacatcagagctggaagtggtcatacagcacctggcctgttcttcatgtcacagatgagtatgccaaagcctgggaaatggacaactcgcccagggtcccttggtcatcagcaggcccacactctaggcaggatggtgtggattaagggtggggacagtggaacccagttgctaagctggatttttttctaggtcactttgcaagccaggggtcttcagccagtgacacaccacttgggcctcactcaaccacgctacctgctacaggagatgggaccatctccagatgggaccacccatttggcccacctgggctgagtgtggcttgcacactggttcccaagttcctgtcccatgcccaagaagaatgaggatgcactgacaattaaaaagagagcaaagtggggagttttattgagtgatgaaacagctttcagcagaaaggggatgtgggagtggtccccctacccaaaggcaggaatgtcccccctaatatggctaagtctggggcttttatgggttcagaataggggaagggcaggctgtaggtagtattgaaaaaggcaatattcgattggttaaaagtcatcattcagaaagaataaattgggaaagggtgggcaaacaggaacagaagttctcactctgggacgtgggtttcatccagtctttcaaccttcaggctgtttttggcttgaaggtggggtttcaccggggaccctcccctatctgccaaggcatttggctgcctcctgtcactgtcagttgcctggaatcaaatcctatctctgcttcttgcaaattacttaactcccctacacttgtttccttacctttaaaatggggataattggaatagttcctacttcatggccatgtcatgaagattaaatgagttaatatatttaaggtgctcaggatgggacctggtgtgtaataagtaccatgtaagtgttagtggttgtggttacattatagtgattattattaatgaattcaaattgcccctttcctgtgtcaccgttcttaagcttcagaataaagatattaaacatcatagaaaatggaaagccacagtgaatcagaggatgccaggaactcttataccaagttgtcagaacacacagcctaagaaaccagaatttgttataaaataaagtgtgaattgatatttggcacacatggagttattcattaagagtagagaattcaggccttattcatgtctcaggaatgggctaaggacagtataagtgcaccattgttcttaactgtagaaaggaaaagaaaatatgagtgtaaaattaatcctggatgagagagaatggaatatgagaagcagcccagaaaacaaacatggtcagatattgcttttctctggtaagattccaaagacattgattgttgtggatttaatattacaaagaagtttatcaggtttggggaatcctagaatgtcaggcttttagagaactgcctagaactcaagagggcttcattgaaccaagcacatatatcctctcaagttctcctgccccaaccttcattcgatggcagatctccttaatatatccacagcagatggttggctgacttgtgcttggatgctctcctaatgggaggctcagggcaccacgggccacccactggttaccagacagctctaactgttagagaattctttcctagactgggccagtaatctgctttactgaatattggccgattatccctacatttatcttttggtgtaaaagaaaataaatcttgctttctccttcttgatggtggagactggcattagaacttctggtagattgctggtcctgacattaactgagctatgagacctcaaacaagttgcttaagctctcaatgccttgccttgctttactttaccttattttcataagaggcttgtgaaggttcaggtgaataagcatgatgtagataaaacatggaggagaaagcctgttactatttatccaatagatgatggttaaaattatcactatgtgaattcagctcttgggactcccaaagccttctctaagctaaatatcccatttcctctatgatatggtttggctgtgtccccacccaaatctcactttgaactgtagttcccacaattcctacatctcatgggagggacccagtgggaggtaattgaatcatgggggcaggtctttcccttattgttctcatgatagtgaataagtctcacgagatctgatggttttataaagaggaattcccctgcacatggtctattgcctgccaccatgtaagacatgactctgctcctcattcaccttccaccatgattatgaggactccccagccacgtggaactgtgagtcaattaaacctctttcctttatagattacccagtctcgggtatgtctttattgtgagaacagactaatgcactccagctgttcctacctggcctggtggccaacccccaccccattctggttgctctcttggattgcttaattgaaggtttcacttctccctccacttgtcccatcatcatcagtccttgtccaataaaaagagaccctcaatgaagggggactcaagtcagaacaggtgcagctggctcctgaaggagtgaaaagattctaactttaggggctgagacattctagtggggaggaggcctttggggtgccccaggaagaagtcaggtcaaggcatgaacccacaggtggctgctccagggttgtggtgtgtgggcagagagaaagctaaaggggagatttcagcttttctcccagaatgttcaagccatctccaaggagcaagaaaccagtcaggattcagtgaagatctgtccacaaataagaaactatgacattggaaggtacttgctttatcttgtgaccctcaagtccctgagctcagttaacggggtgcaagaggtagcctcttgctaaattaggtttatttatcacccttgatctgggcactgcaatatcacaaaaactgcctaaattcatgccccattagtaacatgctaatgatgttattactcacttactgagtttgtggtcgctaaaacctttagatttttttttcatgagaaccacctgcaaagttttttccatgctgcatgtgtatagctgactttggaaatcaaatagggaaatttataagctgccagcacagtgtctagcttgttgtaagcactaaaagaatggtagctattttattagcagtagtggtattaatattatccttgttaggtttcatttccctggtttcagcagctttgctcattgaggttattttgagtaccaattctgtttctctctctctctccccacccccctctctcctcccagcctccagctaggctccagtttgaccagggtgctatctgagtctatcttggggcttaacttaatgatagaatctgatacagcctgagacacagagcatgcacaattagaagcagtgctaccacttcactccttcttttcatccagaaacagatccctcatcaatgtccaaaattttacaatgagaaaatttcttccctggctttagcattgtccttctctctattattcaaatgtaaaatacaaatgtctgtggaggaactacttattaaccacctaggaacttagacggaattagttgataaatatgaggatcctgggttatggagagacagtggaagtagaaggaggtgtgacatcataacaaaattatatgtatatatatattttttggtctctgtctctggttcctggcatagagttcctaaaacctgtaaattcctgagcaatgggggtgctaggtatatcttttgttctactattttttttttttttttgagacagagttttgctctgttgcccaggttggagtgcaatggcacgatctcaactcactgcaacctccacctcacaggttcaagcgattctcccgcctcagcctcccgagtagctgggattacaggcacctgccatcatgcccagctgctttttgtatttttgtagagacggggtttcaccatgttggccaggctggtcttgaactcctgacctcaggtgatcctctagccttggcctccgaaagtgctgggattacaggtgtgagccaccatgcccggcctactatttggcttttaaccctgtctcctgacacagagcttctagtccttgaggtttcctgggtgatgagagcatcttttgttctaatgaggtgactcctggtggctcctggatggcagctggtcactagaaagacgataccatgattagaagcatagaactttcagcctcatgcccccattttctgggaaggagcaaggggctggagatggagttgagtacataattggtcatgtctatgtgagaaagcctccctaaaaatccctgaacaacacagttcagagagcctccaggttgctgaacaggtggaggtgctgggagattggtgcaccccagaaggcatggaagctgcatgccccttctcccctataccttgctctaggtgtctcttctatctggcttttcctgagttgagttgtatacttttgtaataaactggtaatcaagtaacaaagtgtttccctgaagtctgtaagacaatctagaaaattatcaaacccaaggaggtggttggggtcagaagcacaggtgacaacttggacttgccattggcgtctgaagaggggcctgttttgtgggactgagctcctaacctgtggggtctgcactgatttcaggcagatagtgtcagaattgaattgtaggacacccagttggtgtctgcagagaactggaaaattgcctggtgtgggaaaaacccatatacatctggtgccaaacagagagtgttatgagtgagtgtagaaggaaaagcagtggctgggtgcatggctcacgcctgtaatcccagcaccttgggaggctgaggcgggtggatcacgaggtcaggagttcaagaccagcctggccaagatggtgaaactctgtctctactaaaacaaaaattggccaggcgtcgtgatgggcacctgtaatcccagctacttgggaggtggaggcagagaattgcttgaactcaggaggcagaggttgcattgagctgagatcatgccactgcactccagcctaggtgacagagcaagactccatctcaaaaaaaaaaaaagaaggaaaagcagtgagttttcccatacacagtgtaaaaggagataaacctgtgaagaaagggatgaacaggccaagcacagactttatttacatcccacacttgtcttgagaagttttcatgaagctacacaccaagagaatggtagctattttattattggtattattatccttgttaggtttcattttcctggtttcaccaatttagtttgttgaggttattttgcccttgcagagaagggcaaaattttacacacagagattgtagtgagttgaatggtggcacccaccccaaaatatatacccacatcctaatccctggaagctgtggatgggaccttacttggaaaaaggatctttgtagatgtaagtaaattaaggatcctgaaatgagaccatcctggatcatccaagtgagcataaatccaacaacaagtgtcttttttttttttttttttttttgagacaagttcttactctgttgtccaggctgaagggcagtggcacgatcacagctcactccagcctcgacctcctgggctcaggtgatcctctacttcagcctcctgggtagctgggactataggcccacaccaccacgccatggctaatttttgtatttttagtagaggtggggtcttgccgtgttgcccgggctggtcttgaactcctgtgctcaagggatcctcccgccttggtctcccaaagtgctgggattatcaacgtgatctgcccgcctgaccttaacaagtgtctttttaagagaaaagcagagggaggtttgagacggagaggagaagccaagtgaaggtggagacagagtttagggcgatgcagggaggaaagccaaggactgcctggagccgccaccagaagctgggagaggccaggaaggattctcccctagcactcccagaggatgcagggccttgctgacaccttgatgtggaacttctggcctccagggagaataaacttttaagtcaccaaattggtttgtgataatttgttacagcagccacagaaactaacacagagggtattttcctcctcacagtctgaaggacctgcccaggggaagaagtaaaccacctcttacctttccgaccatctcagaaccacgaggaaataggaagtgaggcctggtatgcagagggacgactcaaacaggtgattaaggaattaaccagtcacttgttggaggataatgcctcagtgagcaagaggcatcccgagttcatagcagacaaggacgcctgacagctctggtggtccctgacaagtctgacacccacggagaagcctgaggggacgaagctggcctgggtgatgggcgccatgttggatcccagggaggcaggaaggcaccaggcaacgcccctgactgggagtcatcccaggccagcgtcttcctgtttgctcaggaagaaacattcattttctctggcctcagcctcctaaactgaaaaaaataatgttgttccactctaagaatactgctgcgggctaatttattcatggctgtgacacacatagctttctttaaaataaagtccctggtgtcatttttaatagggtcataaatgcaactcgaagaaactgtctttttgcatctacctgtgattgtttctttgtatcagtcagggtagtctgggttattctgtggtaacaggcagtgcccaaatctcactgttttaaaacaatgaaggttgttgtaggctgaactgtgtcttcagatgtggtcacattctgaggtgcatatggatttttgaggggacacagttttttaaggggacattggtcattgagggaacacagatctttaagaggtaattaaattcaaatgaggtcattagggtgggcttttatccaatatgactggtgttcttagaggagaaaatgtggacacagacacagagggaagacgatatgaagataaaaggagacagtgcccatctgtaagtcaaggagagaggcctggaatggatccttccctcatagccctaagaaggaaccaatgctatggacactttgacctcagacttctaacttctacaactgccgagacaagcaatttctgttgcttaagccacccaatctgtggtacttagttacagcagccctagcaaaccagttggcttagaatgggtgtattaatccattctcacactgctctaaagaaatacctgagactgggtaattaataaagaaaagaggtttaattggctcatagttctgcaagctgtacaggaagcatagcggcttctgcttctgtagaggcctcaggaagcttccaatcatggcagaaggcgaaggggaagcaggcacttcacacggctggagcaagagaaagagatagagaagggggaggtgatacacactttcaaacgaccagatctcatgagaactcactatggcaagaacagcaccaagggggaatctgccctcatgatccaatcacctcccaccaggccccacctccaacactggggatagcaatttgacatgaaatttgggcagcaacacggatcaagccatatctatgaggaatagagatttttgcacttttcagtcattgctttctccctggttcccagaacaggattatgttctagacacttaagaaatatttgctaaattatgttgagttaatcttataataacataattaaggtcaactttggctatctgtgtgatgttagtttcttcaaaataatgtcttcaaataatttctctgaaataataattgccgatgtgggagaagctgtacttacttgtgtcactgagtcctcagtgcaattgcctggagctgaaagtggtgtcctggccctggccctgtcgtgtagcagaagatctatgctcttggagatgctgtgatataaatcaactcaagctagtttagagaatggaaggatttctttttcccctaaggagttaacaacaaagtcatggtaagtgtagggggtccttctgggccacagaaacaactagaagcagagatatttattttattttattttattttattttgagacagagtcttgatctgccacccaggctggagtgcattggcgtgatctcagctcactgcaacctctgcctcctgggctcaagtgattctcctgcctcagccctctgagtagctgagattacaggcatctgccatcatgcccagctaatttttgtatctttagtagagaaggggtttcatcatgttgttcaggctggtctcaaactcctgacttcaagtgatctgcctgcctcagcctcccaaagtgctggaattacaggcgtgagccaccgtgtctggcctagaatcagggattaaaatagcaccacaaatctctctctctctatctatctatctatctatctatctatctatctatctatctatctatctatctatctgtctgtctatatctatctatctatatctatctgtctgtctatctatctatctatctatctatctatctatctatctatctctgtctgaattctatatgtgcttctttcttcatagcaacttctttctttcctactgtgtcgtgctgcacagtggcgtcctctatatggctgggacctggctattggattctttccttagctccaacttgggtgctacctggagaaacattttgattggtctcccttgggatgggtgctctctctggtcccatcaactgtagcctgatgaccatgtactcttgcccagtgtagtcgggtgtttactctggctttattagctgtggtcaaggggacagtctatagcatagacatggccaccagtcaccattgttttaatattcattgaaagaaaagctagaaacccatcactatttatgcagactcttcctttttcttgggttcctgttcctgcttcatagttgattcctttgtcactcatcacagcctgcactcaggaattaaccatgttgtactttatactgatccctgctaaggaatctctcaaactctcagaaatgcccaattctgtgacaaagccagaccaccctctacaggtcggggcttgtgcccaccacaggctaaacagtctaggtttggccaagagcagggtttgaagaaagaggcatatcacagctgggcactcagtaggtgtcagtacattgtgttgaatgaaaggttctgagccagagtcctgaagcaggcacctgggcaggcacgatcacagggctctcacctctctagctgggacctgggcctgagctcagtccccgtgatggcccttggtgaactttctcaacatatccctttcttctcctttggtgacttcccatggctgaattctacctttactgtgtacagggttgctgtctatctcaagcccctccctgccacctatcataagctccataagggcaggcagtctttttcacaccgcatgcctgtcatctagctcactgcctggcatatagtaggtagttgaatacatgaatagggtaatgggtgatcagggcctggaggaaggtagcaggggaatctgtactagacccagagtcaggaaaggcatccccaagaaatggcattaaagctagggtgagaatagcctgggaggaggataagcacagagctccagggactctcctctctccttctctgcccagggacctgctgcaagctggcagcacagacacagccagtggggaacagcttgcagcaggcccctggacagggaaggaaattagtggcagagccaggcctagactttgactctccacactcgctgtcacagccagaagagtccctggtttggttccattccagaaggattatagtaggttgatgctttcttgaactccaatgtggttaaaatcatcaccaaacacttgggcccagtcagaggactccaactgtttgatattccatagactctcaagaggaaaccataattgcctattagtcattttgcagctggtaccaaattacgaaagacagcacactcgtgtgtgtgtgtgtgtgtgagagagagagagagagtcaaaaagtggatactaagataatgcagaatggcttagaatagttgagaaaataaacacgtaaaaagattagtaaataagaaaaccattgagtcatttatttgaattatataattgattcagaatagattaaacaccacaaatggatagagctgatgctcttaaaacccaaaagaaaacactttatccatagtgttggcagtgttggttcagtgttaatccaaatacgatatgaagctacccaaattcgaattaaagggttcttagtacagcaaacgccaggacagaataacaagaatccaccatccacccaaagctaaaaaaatgctgtgcatgcatgactgaaacccttctttcccaagtggaaacaccaacgcattaacaaatatttaatgggacttaccatgtgcgaggtactcagagaagcttccaaacttagcaaccccttttgtggctgtcctgagagatcctttcacatttactaattgcacctcagatccatttgttgatgaaaagcaccatgcagctggagatcttttatcaagattttacatcccctccctcttgctatttggctttcttttccaacggcatccaaaaatggggcatgagctcatgttcccctgtgctgccccttgttcacttcttccctctttcctaccaccattcaaggggcaggtttaggtgatctggctacagattgttcagcccagttggacccctttaagagttcttctcacctttttacaccgttggtgggaaagtaaattagttcaaccattgtggaagacagtgtggtgattcctcaaagacctagaaccggaaaaatacaatttgacccagcaatcccattactgggtatataccaaaagaaatataaatcattctattacaaagatacatgcacacatgtgttcattacagcactattcacaatagcaaagacatggaatcaacccaaatgcccatcagtgacagactggataaagaaaatgtggtacatatacaccatggaatactatgtggccatgaaaaggaaaaagatcatgtcctttgcagggacatggatggagctggaagccattatcctcagcaaactaacgcaggaacagaaaaccaaacactgcatattctcacttataagtaggagctgaacagtgagaacacatggacacggggacggaaacaacgcacactggggcctctcagtgggtgggagaacattaggaaaaatggctgatgcacgctggacttaatacctaggtaatgggttgataggtgcagcaaaccaccatggcacacgtttgcctatataacaagcttgcccgtggaccccagaaattaaaataaaataaaaattttttaaaaaagagttgtcctctgcctgagcaacataggagaccccatctctaaaacacatttcaaaaattagctgggcatggtggcatgcacctgtagtctcagcaactcaggaatctgaggcaggaggattgcttaagcctgggagtttgaggtcacagtgagctttgattgcaccactgcacgccatcctgggcaacagagtgagaccctgtctctaaaaaaaaaaaaaaaaaaaaaaaaaaaaagttgtcaagccgggcatgttggctttcgcctataatcctagcactttaggaggccaaggtgagtggatcacctgaggtcaggagttcgagaccagcctggccaacacggtgaaaccgcatctctactaaaaatacaaaaattagccgggtgtggtggcacacgcctgtaatcccaggctactcaggaggctgaggaaggagaatcgctggaacctgggaaacagaggttacagtgagccaagatcgtgccactgtactccagcctgggtgacagagcaagactccgtctcaaaaaaaaaaagttgtcttgtggcctagaaagttgtccctccactacacagagtccctggaggacatctaggactcaaggactcccttaccataaaatgacacatctgcacagagcagtaatttgatgaatgagtctctgtgactcccctgtagactcacagcattgcttctcaggccaagttctggaacatatcatcctattcccccatccatactgccctctgacaacaagtatctgaaatattttggcctagattcctatctcaggcagacacctagaattttagaaaacatcaagttgagtattgttgttagaggtggcactagacatttagcaacccagaagccaaacccacaagggaaaggtgtgaccagggaccacgcagtggacaagtttcagtgactgatggaaagctcgttataaccaaatgacatctcttcaccaggtgtagtggactgaataatggctttcaaagatatcaggtcctaatctctgaaacctgtaaatattacatcatttggaaaaaatatctttgcagatgagattacattaattatactgagatgagggagattatctggattagccaggccctcaatgcaatcacatttatccctgaaagagaagaccgaggtagattttacacacacacacacacacacacacacacacacacacacacagaggagagggtgatatgaagatggaggcagagattagagtgatgtgtccacaagtcaaggaatgcttgcagctcctagaaaccaaaggaggcaagaacagattctctctggaacctccagagacagcatggccctgccaacccttgattgtggcccagtgataatgatttcagactgctgccttctggaattgaaagggaataaatttttgttgttttaactcacctggtttgtggtgctttgttagggcaggcacaggaaactaacacaccaggtacagaacataaagagaggcgtcatgtgtgagagacatgcctttctcatttggcctttcccagaattaggtgtggctggtaaatctcagtgcttgatgtcggatattgattgcataagacatgcgagaatgacgtgagaggctttataaatccaatgagtcaaccagggacgggtggttggctgtggagacgtctaggtaagctgcgaccatgaccgggttaagctaacacttctgtgagaacacgtgcttcatacaaacagtccagacagacctagaagatgtgatctcctaggtctacaaactcctacaaagcaggagaccactgagatattaggttggtgcaaaagtaattacagttactgccatttaaaagttatggcaaaatcacaattacttttgcaccaatctaatgtaatcacagagctgcaacagaggttagtgctcacttccttctgcccatctgtgtgacaaagtcccagggttacacagccagccaggagggagcctcccctggcacccatgagtctcatgactcctagtttcctgttggctttctttctggctctgcctatctgctatggacctgtcattcatgcaaattgggtgcctctgtttctcgggagctgtgtagagcctagacaagttcaaatcatcccaaaggacttagagtaggtcggaatcaacataatcaatgcccctgacactgcccctccacatgccctacaggagttgggagcgcgcacctccaccctatattgttgtctccaaattcttctctcccttcccttctctcttcttccctgaggtcagcctcacattctgcaggtctagcgaaagggtgtctcacctcaatcatgagaaagaggagtcccagctccaggagaagcaggagcagcccaggaaggggcttctcagaccctgagaactgagccatggagtggccatgtgctgttttagaacacagctgacaggacaccttggctcttcttcaccagagactaaaatcaagagaagcatcagaagttttggagttctcactgttcttgccccagggccacagagcttcagctacctgctcctcccacaagatccagataactctcagccaccctagaggagtccttattcttctaggcccccaagggttctcaagcctagacacattaaaaatacctgagtatttttaaataatcccaatgcctgagtccctctcctacagactctgatttatttggtctggagtggggcccaggaatccatatatttttgaaaaatcactccaggatattctctctctctctttttttttttgtactttatttattatttatttatttatttatttatttccagagagggtctcgctctgtcacccaggctggagtgcagtggcgtgatcttggctcactgcaacctccacctctgatgttcaagcgattctcctgcctcagtctcccgagtagctgggattacaggtgcctgcaactatggccagctaatttttttgtatttttggtagatacggggtttcgccatgttggccaggctggtctcgaactcctgaccccaagtgatctatccacctcagcctcccaaagtgctgggattacaggccactccaggagattctaatgtgcaagcaagattgagaactcttgagctgcctggccttcagactttttattttgcatcccctctcagcaaatcatgaaaagccttgtcccctggcatcacagcttaaataagttaaagtagttgcatggaatattatttctgacctattatacataactatgaacatttttaaacaaagccattttaaatgtattaataaacatatccaatgatatctaaacatcatagtgatttgatatctattatccatttgaaaatacataaacaagccgggtgcggtggctcatgcctgtgcttccagcactttgggaggctgaggcaagtggattacttgaggtcaggagttcgagaccagcctggccaacatggtgaaaccgcatctctattaaaaatacaaaaattagctgggcatggtggcgggtgcctgtaatcccaaatacttgggaggctgaggcaggagaatcgtttgaacccaggggacgtttgaacccaggttgcagtgagccgagatcaggccactgtgttccagcctgggtgacagagcgagacttcatctcaaaaaaaaaaaaaagaaagaaagaaaaaatacataaacaagctcctttatagtagtctaaaattttacactacttttttttctccttgagctcatattttcattgcctttccctaatgtatttttctaatgtaatatatttttatactccaatgcctgttgatcatcctgttttatttctctgccacaaaaatatctacataaattgaaaattttatacataagacttttattctgcattcttaagccctaagtgttaaaatatttcttcttggttatcatgaatgtcactagtagtacccattaatcagcattatataaaaatatcacgttattaaacatgaatacaatttttaaataggaaaggtaaaattgcattttaaatgaatttctcagtgagctagatgagtatttgttcgtgttttccaatgagctcatgtatgtgggaatgaatgagacagagttagcaacagttttattttcatccttagttttatagattcaggtgctggtaaacattggcttacacaaataagtaggaggaaagagaaaaatttctcttatattagtagcactcaattctctaagctccttccaaggtatctgccaaaaatcatattttccatctgtcagttgacagctcaattaagtactccttcaattttgctcaaggcaaggaactagaaaccatttgacttgcagaaggatttgttactcagtcattagaaccactaatttctcttactctctaggaagtacaccaaaaagctttaccaagacttaccaagtgattcttaattataagtttctttggaagcatattttcatacctggtatattcagaaaaggttgaaaagcctgaaatatcattaatttcaattcttgtttatcaacgtaatttaaaaatctatactttttaaactacgtgctttgtgggctcgccccaccctgccccccagtttcagtcattcaacatacagaaaatgtctgccgtgtaatcaaaatagcaaggccaggtctcactgtcaaaacaggcttactttctgttagaaaatgtccagctttgccaggcacagttgctcatctctgtagtcccagcactttgggaggttgaagtgagctgattgtttgagcccaggagtttgagaccagcctgggcaacatagtaagaccccatttctttctttctttctttctttttttttttttgagacagaatcttgctgtgtcactcaggctggtgtgcagtggcacaatcttggttcactgcaagttccacttcctgggttcaagcaattctcctgcctctgcctccaagtagctaggattacaggcacctgccaccacacccagctaatttttgtatttttagtagggacggggtttcaccatgttggccagtctggtctccaactcctgacctcgtgatctgcccacctcggcctcccaatttctacaaaaataacatttagccaggtgtggtggtgtgtgcttgtagtcccagctactcaggaggctgaggtgggaggatcccttgagcccaggaggtcaaggctgtagtgagctgagatcttgccactgcactccagcctgggtgacaaagtgagaccctgtctcaaaaaagaaaaaaaaaatgttcaactttattttttaatgcaaatctttctgttgacttgcgtcctccatgatggcatccttgcattcctgactgagacatggacagctgggccatggagctccacccaccatgaatgtctgggtgacaatgtaatggggtccaggtgaagaaaggctcagctctgtcagggcatctgctttgtgcccatgggctccaccttaggagggctgccatctttgacagccagggcagggggtggcttatggtggaagaagggacccgtgtttgggtgggttctccaagaaacagacccacgatgagcttacacatgcagagacttggcatgcaaagattttgttagaggaatcaaggatgagagaaagcaaaggtggggtggtggtgctgaggaaggccgggaccggtcagatggcagtgtgagtgcgaggctgcatgaaggagagagggtggaagcatcccaggctgctgtgcaccctcaggaagtttcagcaaggccaccagggaattcgcgagtcaagtctggccatcggaggagtcccgagtctcccaggagcagatctgcctcagtttcccagtcgcattcagtggttggctgagagcagctcacggtgatggaatcatgcacatttgtgccagtggatttcagaaggcaggaactggggcccctgagtcaatttagccccctggagctggaattctgtgaggagccttctcatggccactccaggaaatgtttgaatgaaacttgtcaccacttctgccaccctggtctttaacagatgtgaaacaagagcatgacgacatggacaaaacaccgtggtttgtccattagccacaatgtacttaagatggaaccaatcatgggctcgtagtatcttgattaaagaaggctaatgccaatgtttcacattgttattgtttggcacctgggatgtttttaacacccctggggcaatgttcatactcagacgctggagaggtgaaagggatctcttcattttgcacggtgggacaggagagattataaatgggcagaagggaaaggactccttgtacataaactaggacatccctgtgtagaggttcccatggacatccccgaggggcagtgtcagtttgggtcagtctacttcttaagaagcagacactaagatggaattagacacgcaagagattgattgactgggggacacatctgtgaaaggtaaagagaacgccttcagagtacagctcagacctgatacctgtgggaggagtgaggggaggaaggaggcctggggaggagcaatctcagggaagcccagcagatggagatcttcaaggcaaaggagcattcactctgctcagtgatggactgggagcagcttgaggagtgcagtgggggtgctgggggctccctgtgagggctgaaacagatcagaatatgcagaacgcagtgcaccagtttctctctatgcggcaggttgccttgaagggagatcagagcagcgtactttgtagctgcacagtattccctcttggggacatctctttcctcccattgcctccttctccctctccccacactgtgtagctccttagtctcttctccttcaggcctcagcatcccctctccctggtctgtccgactctcccccacctcagtctccatttgtgtcatgaaaaatctatgggccccatccaggtgcacaaaagtcacagccaggctctctcctgcccactctgctgtggaggtggaggggagagccctgagccctgaggatggaggcatggagaaaagaaattaggatggtcttgactcaaagtgacagctcacttttcttttctctttctgattttcctttgtcagccttggacatctgaaaataaactggtcctctggcaccatgagggttaatctctgccattaacttcccctggcctgcaagagatgtccttcctgcaggcacaacagtgggacaacatgttgctaatagagagtcagtaacctgaattgcattacaaaacagctccggtaaattagccttgggaagtgccctgcccacttgctgggtatatttttgcttgtatgtagcaggcagaagagggaagggctgtccagctcccaagcaactcccgaaactctgtcttccattcggaaggctggactttgcatcactcaactttgtttcttttcacacattcccgattctaaccctaaatagatttaatacaaaataaaccccaccccagattaaaatagtatattatttgtgctttatatgagtctcagaaattactttcaataatctctgtataaagttttaaaaccctaaactagagttaaacttgtggaaaagaaaggaagaagtgaatggttaacaccaattcacagtaggtattttactttgtaataatactgctgaatttctttctttacaaaaaaaagcatgcatttataatccttgatgatcacaacaaccccttgataataaaattaagtttatgacatgcattactgaaaactttaaaatgaggcatctagagcccagagtgattaagcaacttactcaaggtcacacaggaagtgattaggaaagctggaacaactctttggccttttggatcagacctctatgctgaaaaagaatcctgagtttcaagtctggaagatgaggaaggaagccgtgatgtttggagacagagtgtgccttctatagctcaagataaaattctgttataggaagaagctcagatttcttaaataccaagatttgatcccaagtcaatgaccaataaaagcttattatctgcaaccatgtcagactctggcccaagagtttaatctttctaatcacatattctatacattattcgagaaagaaaggtccggaaaagcatccctaaagactcaaatattccaaggagcaaaaaatatagataagacaaagctccaaagactcctaacagtggaaatagctgtcagatgttatagagaagggagctgatgggttcccacatgctattaacaaaccatgaagaagtcccttagcctttggacctggagttctcaaccctggctgcacattagaatcacctgggaagcttctgaaactcccaatacccaagacatacccaggaccatttatatcagaatcttccagcgatggaagcctggtgttgggaagtctttaaggctccccagctgactccaatgtgtagccaaggttaagaaccatggctctaggacctaacacataagttgaatgaatagacggatgaatgaatatcagcaacagaattgaaaaaagaagaaacaattaagaaactaaatttgatgttatttactcagatggaagaccctgaggtcctcactcaaaatgcgtatgctgttcacgcagaagcagttctatgaagtttggatgtcaagattctcagctcacaacagggatgagaagagaagatggttctctgtggagcagagtcaccaacaatagcaggaaggacaaatgtgacagcctgaaagacaagtaagaaatgcaaatcctacttctatggttgaatgtgtccccctaaattcatgtgttggcaactgaatccccaatgctagttttgagaggtgggtggtgttaatcacctttaagaggtgattaggtcatgaggctctgcccttataaatggattaatgtcgttagggtgggagagggttagttatcgcaagagtgggttcctgataaaaaaggatgaatttggcatccttcccctttctctttctcacatgtactctattgtccttccaccttccaccatgggatgaccagtaaggccctcactagattgtagccaccttgacctgggacttcccagcctccagaatgtaagagataaatctttgttctttataaattaccgagtctttggtattctattataacaacacagactaagacacctataaagcaggagacagaactcagcgaagagttgtctggggccctttaataccagggtaaactgacctgcccagcccagtttccctggaggcgtcattgtattagcagaacagtgcagttaattggtgttcgggtgcctgagtcacccagcggaggcgaagttctgttctctctacactgtgtaagaactcacaggaggatgggcagagcactcgacttcctcagcactggctatcacagactgcccttactagaactgcgtctgtttttgaaagcctgggtgggtttaatagttggtaaaagcagcatgttaaagttggcagcagaaactgcctcctaagagaatcacttcctaagaggggaatatgaaatttctcattgaggcaggctgtccccttctgtccctttgtcagggaaagcctctctctgggggaaagcaaaggtggagctggggtgcatagacctctgtggagagaaaacctgaatttggcaaagtggtcctcttacagatttcttagtctgaggagttaagctttttcttggttttgcaaattcagtgtctcttttggcagacatttgttattagaagagatctgtactttctcagcagggagtgacattgctctgtgtccttaagatattgcctgttctagggagttgggtatgttctccaacaagctggagacctagatctgtatttccgtgggaacaggaggcctctgcagacttgaacttgacctcacactaaaggaaagcctgtgcgaaggaagaggacaatcttagaggcagtcatttaagtctgagtgccccagaacacagggatgttgggtggctactttctggtgccatttcatttgtcccactcaaggccataatgcaagcttggggaggaggaactcccctgagaaaagagaccatccctgctgataatcctactaacctgattctaggtcagtaaatgaaaacttgaaaggtgaatttcagactggagaaggcagcggggaaagggactcaagtccgtttttctcggaccaatggcagtgtatggtaatgtggggctagccctgacatcgggaagacagttaagagccaaacatggtgaggaactctggggctgggtcaaggctgggtcaaggctggaagctcagagccacatctatttggaagtatcagctgttctttgggttgtattttcttttttctgtcccctgaacaatatatcaaggaagtttggctgcaagtaactgcctggtccctgagatgctttggggagaatggggaaggcaggtctggaagggagcacaaaagatggcaagagagttgctatgagcaggggtcaccagcagagggcagagggcagaggtgcccaacggagcagagagtgctcaatggccatgggcggcaaagggtgcagtggggtcgcagtcaaaatgcaggctgagggggacctgggcatgtgggcaacggcatcatggcgctcacagaactctttagaggatacactgaagggcaccaatccctgacaattagcaagtcaggatcgaagccaacataattcgagtatttcatggaaacaatatctaactacaaacagctgggtcttcaacaggtgggaaacactgggaattgaagacttgtgttcagaaattctatctaccagctcccagccatgggacttcaggcagttcccctgcgccacccagtctcggtgcctcatacgacaaacaggtgcctgacatttaccctacagacctcttgaggttgttgttttaagtagcaaaggcaataaagctcacgtatattttgtaaatggtaaaatactttgcagacttaacacactattttatcttggaaagtttttccaactgaaatgatgaaccaggttaaacattttttgacttttacctgtgatcctaacaggcactctgggggattctatctggcaagtgtgggaaacacagctggcatctctcctggtccactggcctcccatggggggaaggacagtccctaggaagcagcccatggatatagggaggaggtgtggggtggcacactcatctctgacttacaggaaaaacagaaactttctctaaagcaaataaaatgcagaaaatgcagctcagcatataaccaagataaccaagcagagaaaaatatttaagtcacaaattggcagtttaaggagtatcagcattctgagggaaaattcaggagacagctgatgaatccacaagttcttactcaattaactttaattggctagtatctgataggcagctgttttaggcagggcatgatggaagttataatgttaaacagaaatagatgtcagctttgcccttagggaaccatatatatatatatttgtttttgtttttgtttttgttttaagagactggtcttgctccgtcatccaggctggagtgcaatggcatcattatagctcactgcagcctcgaacttgtgggctcaagcacactgcagcctcgaacttgtgggctcaagcaatcttcctacctcagcctcccaagtagctgtgactacaggtgtgtaccatcacccccaattaatttttaaaatttttgtagagacagagtcttgctatgttgcccagattggtctcgaactcctggcctcaaatgatcctcctgcctcagcctcccaaagcactgggattacaggaggagctgcaatttttgagagagaaaaattgacatgtgcaagagcagcaacaggccaaacatgagccatgagatcctacacctataccatccaatatgggagcaggccatgagccacatatgggcagtgaactctagaaattcaggccactttgagaggtgctgcacatgtaaaatacactccagagtccaaaagcttggtacaaaaaaagagaatgtaaaatgtctcattaatcaatttcacactgattacatgttggagtgatatttttagtatattgggttagataaaaaatattagtaagttttttttaaaaaatgcttttcattaaacatcagttatctgatacatttatttatgtgggatcctcctacccaaataagctttaattagatgttgttgtgctcctgttaaattcaattctgtggagtttagcaccactgccaagagcctccttcttagcacgtctcttcttcctctttagcggcagttctcaaaatgtagttagaaggcagagactctgttttcacctgaatttaatctaaatctgattccaatcaagatccagataaaatgcttgttacttatctcagcagctagtttcccagattcagggagtaacataaaacacctgcctagcaatagcagaattctaatgttttgaatgccttgggccagggacacttttgtcactattcagtttcagccatcaatgaaaactccttcttcttagctacctggtatggacggttgactaactggttgaaaaacagtcaacagtctggttagcgtctttgaagcttcctgaggatgtgtaccactcagtcataccttcaccgtgcttacaagagcatctgttgtgtatgtagtggctgccccacaagtagttgtattgataaattctaaatgttgctattctttttttttttttttaaagagtctccttttttttttttttttttttttttttttttttttttttgagatggagtcttgctctgtcgcccaggctggagtgcagtggcgtgatcttggctcactgcaagctccgcctcctgggttcacgccattctcctggctcaacctcccaagtagctgggactacaggcgcccgccaccaagcccggctaattttttgtatttttagtagagacggggtttcaccgtgttagccaggatggtctcgatctcctgacctcgtgatcgcccgcctcagcctcccaaagtgctgggattacaggcgtgagccaccgcgcccggcctaaacgttgctattctttagaaaggctaaagtccagcccctgaaagaagcctggaggctaatgttttctctttcaaatggttagtgatgaaaactgaaccctttggagattctgattttattctgcttataaaagctaaacttgaacttcactggatagggtggattgtatgcaggtcctgataaaatccctacacaatttccctcccttctaggctgacctgccgtgcctgcagcccacaagccacccccttcttttcccacgcatggcccaaagctacgagctctcagagtttttccttcttgcagcacgagatgacacaaagataggttctggcagttgcaggtacgttcacctcagcaattctagaaaatgccttgtaattactaagcagaaagcacacaatctgagggggctggagaactaagtcttcacataacaaaatctgcttctatatggcattttatatcttccagtgtgatggggaaatgggaacgctttgaacagctgaccagatgaattttaaacaagaattggtaaaaattggactattagagattttgagcattttcttgtggatttattggccatttgtgcatctttgtgaagtgtctgttgaggtttttttctgccattttaaattgggttgtttgtctttttattgttggcatgtatgcattctttaaaaattgagatgtaattaaagcctaaaagcattctttatatattttagatacaagtcatttgcgaaatatatgtgttccaagcatttttttcccagccagtggtttgtcatctcttttcatgagctgaaattttacattttgataaaatccaattttttttatggttagtgctttttgtgttctgtccaaggactctgcccaccccaaggtcatgaagttattatgctttatttgagtaattttgtggctgtggttattacatttaggtgtatgatctattttgaattaactttgataaatggagtgagatagggattggagctcatttttttccacacatatatccagttgttccagcaatattgttaaaaagactttcctttccccattgaattagcaccaacaactggaaataatccaaatgtccagatataggtaaatggataaacacattttagtctattcagtggaataatggaataataaaatacattccatcattggattctaattccagtaatagaatacattcatggaacaatgaaatatattcagcaaatttttttaaaaagcaaactataaatacatgcaacaagctgaatgaatctcaaagacattatttgaatgaaaggagctaaaagcaaaagagttcttactgtatgcttctacatacatgaaattctaaaacagacacaactgattctatagtaacagaaagaaaatcagcagtttcccggttgagggtagggatggaaacttttctggcacgatgaaaatgttctatatcttgttttgagtgttggttacatggacatttacaattgtcaaagtttatttgtctgaaacatctaagggctacacgtttcactgtgtgttaattacacctccatttaaaatatattaaagaaaaaaaaggattagaatgtgaaccttcctggactgtaccttacaataaatagcgaaattcctctctctccgcagatgccttgctgttggaggctgggaaaggaagatgaaatgtgcagagcccttgacttctcccttttcttaagactgtgggataaatttttcaaaacattggctaggagacttgcattcaaaaccagctgagtaaataatggggctttggtgagttgttttttcccttctgtgtttggaaatttgagcctggtgtatctttttcaagcacatctcatttagaggataatttacatttgcacaaaatcatggctacagcccatctgctcaacgattatgtaagatccaacactcattagagtgtgacatgcattgatcttagtgagcatatgaacttgtgtgcttgggattcaagttcttctaaaataacttccagcaccaaccagctaccatagcctgttgtttctgacattttccttggaacatgacagttaatatccatttgaaagaaactaaattattggggggctttaaattcctaatggctatagcagattttctggtagagttaagcaagattgagttggcagttgtgaaagggcggaggctagaaggagagctgtttgttttttgtacctgatggttttatcaccaaagagtatttgtaataatgaaacagctggagcagtaacatgattcatattaatatatgcatgtaaatgggttaggaatggaattaacataatttctgtgctctggttttcccttagaagtggagactactggtttatttacagtctgcaatgagcacagccaggcagttctgctgctggacagatggcagggaaggccaggccatgtgctgtggatcagggggtgaatgtgaacatgacggtggatggcacagctctgcaaaggggctggccagaagcagagagcagatgaaaacaaaggttccttttgtctcccagagttcttagcccttcccatttagtccctttgtcctagttcctcctgccagggctttgcagagaaggggagtggggagatacagggagaggccaggaccaggggttccaaggcagaacctcgtgggaggaagtgaccagaggaggggctgcagtcactagactcagggcactggcaggaagcaggaactgtgaccaggtgagaaggtgggctcagagacactggagaggaaggacaggtcgaggaaatggtccacaggccagtcagcctctcaaagctgagggaggcaggcagtgagagggcccaggaaacaccctgctatcaggacagaaatctggccgggggacaggaagttgagtgtgacgcaccaggagactttgaagcctgtgataccaagaggaaatcctaggccatttagcaaagaacagaatttggccccacgacacagaggcccttgggaggaaagtgaatgcctaaatagaaaacaggcctggggaggccactatagggtggtcttctgtattttttccctctccgttttccattataattcatctccttccaaggccaggttcactcccacgataagagaggcaaagcccctggtcagaagggaagaagcctccatccccagcccatgtctgtctgtctcatttgtgtgtgtgtgtgtcttggggggaagtgaatggagaaagataccggaagtattacagtgatggttgtcccccatgtgggaacatggagtaagagggaaagtcatttgaggaactgcccagctgttctccaccatggctgcaccatttacattcccactagcaatgtataagagttacaatttatccccatcctcaccaatactttttattttctgtctttttcatcttagctatcctcatgagtgtaaaattgtgagtttaatttatatttttctaatgactaatgatgctgagcatcttttcatgtgcttacaggctatttatatatcttcttagaagaaatgtctgtttaaatcccttgctcatttttaaattgttttttaaaaattgttaaattgtaagaattccatgtatattctggatacaaattcctagtcagtagacaatgtgcaaatattttcttccattctgtggggtgtcctttcactttcttggtagtgttctttgaagcacacacatttttaattttgaaggagtccaacttaactatttttctttggttgcttgtgctttaggcatcacatctaagaaaccattggctactccaaggtcatgaagatttatgctcatgttttcttctaagtgttttatagttttatcttttacatacaggtctatgatccattttgtgttaatttttgtatacagcgtgagatggagttgaaaattcattctttagcatgtggttatgcagttgtcctagcaccatttgttgcaaagactcttctttctccattgaattgtctttgtgaccttgtcaaaaattaattaaccataaatataaagatttgtttctggactctcaatcctattccattgatctatatatctatccttaggccagtatcttccagaggcaaaagatcatcagggtggcttttagcagtgggaatcccagaagagcccacaaggcacccaatagacacagtcgtttcagagagtgcaaagccagctcacatggtaccagtgaaggaccctacaggtgctagaggatttctggatgcaccatgaaaaggggacaggacccttagaggggaatagagtagacttttttctttactccccattaccaacaaggtgggggcaagcctttgcactcagcagtaacttgagcacatgagttttgccctagacattctaaagtgttgtttagtgacatagaggatatgtataggacttgattacagttttgctttgactctggccataagtacttttctggctacatcttactcttgcacttgtcctgccttgtcttcccagcagatctcagactctctatgcctgcctctccctggctccatgttgcactggggtccacagttcagctcagccagggtgtgtgatggccaactctcctcatgcctccagccctcccttgaccatctccactctgatattcccagaggcactggtttcctggggctgctgttagaaattaccacaaacttagtgccttaaaacaacacaaatttattctctcacagttctggaagtcagagtttgaaattagttttattggatgaaagtcaaagtgttggtagggctggttccttctggaagctctaagggagaatctatttccttgccttttttacttctagatgccacctacatcccttggctcaggtccccttcctccatattcaaagcggccatgaagcatcttgcttctatagttgtatgtcttctgtcttatatggtcaaatctccctctgccctcctcttgtaaggacacttatgattacatttaagacttggataatccaggatgatgtcttgatctccagctcaacttaatcacacctgcaaagtccctttgctatataaggtaacactcacagcttctggggactaggacaacagggcattagtcagctttccacaccaggtgggatgcgtgcagctgtactggctaatcagagctgatgcctgttctgactggttgggttctgtgccaggtgtctatattttacttcgctctgagcagttatcaaatattttgaatatgatccttgttgtcagccttctttgttaaagagatgagtagacatgaatctgtagaagcctggggaaacaaagtgtgaaaccgattggtgtcctcctgtaaaaaaggcaagcgtgagtcaagaaaaggaaaatcatacaatagaaaagtccagggacaggtcagtcatatggatctgaaatatctgagatggttaagagaaaagccacagaaaagtgaagagcaaagtgtcttggcctgctgagcgggtaataaacaacagagagcttcctgcagtttcaatttaacctgaatcccacgtggagagacagcctggagccaaccaagaagggcttgtttctgtgcaagaaagatatggtagagcctagggccagcctggaagctggactccggatgagactgaacagaatgagctagaactgagatgcaaatgtaggacatttatttcccacacaggtccctgaacctgtacagcaactcctgccttcctttggtggcattgcctcccagagagtaatcactggatccatcagtcacacagaatcattccggagaatggaggttctgggcctcttcccataatcatcagactctccaggggtgggattctggaatctacattttaataagaacagataattcttaacatgctaaagttcccaggcaggagcactttaactgttatatttaggagacttaggagcataatcttttcataggattctgtacaaatggtttggagtcagccatgaatgcaagtgaaatagtcataaccgtcatggggagagaccccatagtcatgtgagacgtgaaggtttctaccgcactggccaactgtgattgattgatggtggatacctggatcatggtgttgagataaatgatgaggctttgcctgagctgggacaggaagagagcagcaattaattagtaatgtctgccatggctataggttggagatggtggttggtggtgaacaagtgcctcctatctgccattttctcctagaaagacctcactgtaccttctcattttatgatgagatgaaatgtacatacaaaacactggatagaaacatacatgtacagtttgaagaacaaaaataaaacaattctttaaaaattgtctctagtgagctggttccaacatctccttgggtaacacgttgcattgtctcacaacttgcttaatgtctaatttaaataaatcccttttggcacagtttaagtccagtccctttcattctatcctcagagaaaaacagaacagctgctcctgctctcctattcaatatgcttccctattttaaagaattcagttcttcagaaaaaaattaatgagactcttctattttaatgagttacttgtttggtggattggcacttttcctcccccaagctcaacattcttggttacagaaatgaattagaatagaacattgagagtagaaggaatttagatgtcattcaattctctgttttcacagatgggacaagaggcccagggaaatggaggacctgacttgctcacacagcagaatcagaactaagacccaaccatcctacctttcagctgagagtaacttctaccagatcacgatatttggatacgcagtgtgttttgaagttggagaagaaatccaagaccaaacacgtattgaggtttattttccatcacctcagtggcttccattctccagcttctgagtctttttgtttgtttttgtttttttgagacatggtctcactttgtcaccaaggctgaagtgcagtggtgcgatctccactcactgtagccttgacctcccaggttcaagtgatcctcctgcatcggccccccaagtagcatggactacaggcacatgccaccatgcctggctaatttttgtatttttagtagagatgaggtttcaccatgttgcctaggctgttcttgaactcctggactcgaacgatctgcttgttttggtctcttaaagtgctaggattacaggcatgagccactgtgctgggcctggcttctgagactttttgccagagggcttcagacccacacctggggcaggccaaaagcactgggggcttcattccccaggagcaatgcttaaggagtgtgggtcgggaatgggtggataaatgctcctgattcttcaccgcttccttgatgtcgtgattctggggtatgtgttccctggtgactcagaggctcctcagcagatctgatccccagttgcccaccccagtgactctctcgttaatgtacccttcatgaacttccctcctgccctctatcctttccctacttcctcattatgctttctgagattatctcccaaataaattatttatacccccatccttccttccggaccttcttttggggaaatgagaacatttccatacttataagaccatacttataagaaaagagcataccaggaagctcgaccagagctgtgaagccggaagtttgcctgcgaatggatttccaatgctgtaatcctcaggatcagctttgccactcacagagccaagtacaaagtgaaaatggggagtccctggttgggaaagcactaagactttcaagatgatgacagcagagcattaaaccatgggcagaggccaggcatgagggctcacgcctgttatcccaggactttgggaggctgaagcgggcagatgacttgaggctaggagtttgagaccagcctgaccaacatggtgaaaccccgtctctactaaaaatacaaaaaattagccggtcgtggtggcatgtgcttgtagtcccagctactgggaggctgaagcaggagaactgcttgaaccagggaggcgggggtttcagtgagccaagatcacaccactacacaccagcctgggtgacagagcaagactctctttcaaaacaaacaaaaaaacaaacccacagcagtgctctcctgagtatgcagcctgcagcgtgagtgactacacaggttgcacagccatgaagctggccccgctaatctctctgtaagaattactgtaacactgatgacaccatttgctgagtcattactgtgtgccaggcaatgtgttggactctagattgcatcatgaatactgtaggggaggaaaagatttttttcctcgctcaccacaaggtttatggctgaggcctttataacaagacagattaaaccatacacatttgtttagtataagtttcacatgacacagaagcctttaaaactgaagacccagccgggtatcctggtgtatgcctgtggtcccagctagttgggaggctgaggtgagaggaccctttgagcctgggaggtcgaggctgcagtgagccgagatcgcacacctgcactccagtctgggtgacagagtgagaccctcagtcaaaaaaataaaagaaaaaaaaaagaaaagaaaagtcatcagtacccaatgatagtcactgtaaatattgtgtttcctttcagtctttgttgttgttgttgttactgtgtactcttttacatctacctttatcaaagctaagatgataggcagcctttttcatttaacagcagtgttaaattagtatattcccattttattgaagttttttgaagaccttttcaaatagcagcttattatgcaacgtgtgaacagtaatttaacaattctcccattcagagatgtgtaaatttgtttctgttttttcaatttatcaataatttactggcacagccttgcacccctgctgcagtgtaagacagtaccctgtgaccttgtctcttttagcattggtataaaattttaaaaatttttttggataattttataagcaatttataatttataatttttatttatttattttgagaaagggtttcactcctgtcacccaggctggagtgcagaggtaagatcacagctcactgcagcctccacctcctgggaccaagtgatcctcccacctcggcctcctgagtaattgaaaccacctggtgtgtaccacctcaccaggctaatttttcttttttgatttttttgtagagatgaagtctcgctatgttgctcaggctggtcttaaactcctggactcaagcgaccctcccacctcagcctcccaaagtgctaggattacaggtggaagccaccttgccttgcctgaaggcaattttttaaaggcatgtctcagagaggagttttgagtaatggcctaatgtgttggaactgagagtatgtaacttcaccaggtggctattttaaagaaaaccacagacacctggatataaaagttttgaaatatggatttttaaaaacccatctatgactttgccatcatccccgtagttaatactgtaaatgatcaatgacagaagaaatcaggatgttatgagcaggatcttcagtgtttgtaaggaaacctgcaggatgtgtggctgggctgaactgtgcccaagcacactttgttcagtgcagtttagaaatggcttgtgatggttgggtactgtgttgcctttgctttatgaacactttagaaagctttgcactgtgtggtaataagtaggtttttcttctttttctctttctttctttcttttctttttttcttttttcttttttttcttttttttttttttgcagttgcattttgttgttgttgttccctcatttgtttttgttatcttgcatccaaatacccttcctcctcagcagcaatgttgaaatatcaggcaagtaggtgttacaccccatgatgtgaggagaagggaggcagaggttccctctcactactccttggtgatgagagatgagcttagacctggccaatcgtgttctccacccgggactctgactctcaagaagtgatacaaagatacagtgaagattgacccctgccaaggcagcaggtgttcagtggcccgtgggggaacgtctgggggtggggctgtgaggcagtggcagtggcctagcagatggtccctctctgtggattttggcagtgttcttggctgctggtgctccttttattctcaacccatttccaagccatgctcttcaatgttcccattaatttcatacaccctttccatacatcgtgtttcctacttcagtttgccagagttgacttgtgtttgttgtcaccaagaaacccggactctgctccttgtcaattatggtgtttattttaatttgtttctaaaactaagtatgaagaattggtcaggacctgtatttctttttgtgtgtgtgtgagacagagtctcactctgttgcccaggctggagtgcagtggtacaatctcagctcactgcaacctccacctcccaggttcaagtgattctcgtgcctcagcctcctgagtagctgggactacaggtttgtgccatcatgccccattaatttttgtatttttagtagagacggggttttgccattttggccaggctggtctcgaacgcctgacctcaggtgatctactcagcctcccaaagtgctgggattacaggtgtgagccaccgcgcccagctgcaaataccatttttatgggaaaataagatgggccccaaagcaccttgttaaggatcataatctggcataaacacagcccatttgtgaactggaagcacttgtcttcactgccttttgtcaatactaaatcccattgtgtcttcatgtttttttacacagcccacatttcgagatttactctttaaaaaaaacccaaaccttgtgacatctttgtgtccacatcctttgccaagaactctatgctcatgttcttcacttctataaacttagcttcctgactccgctaccagaccctcgcccaggactttgaacatagaactcctattctttccagcccatgatgatttctcagagaaaccatcaaatgcagaactgatctccttccaccaagtgtcctccccatctgcatgccaggtcttaggcctgaccttgtcagccatgaactagttttgcccaagcctagcacagcagcattgaccaaagagtcctttgtgttccagagcttacaagtctattaccaaccaaatatagatgtttcctgtgtcctccagggaaaagttctccaagtattgcttttacactagggtatatctggaagagcaaacatgcaagaacaaaacattcaggaatattctgaaaaaagggtaatggaaaggacttgccctactagcaattacaatttattagaaagcaaactcatataaaaatatgggtattgtggtaataaacaggccaatggaatagagcttcagaatgggaattagaaccaggagggaaagatatcttctttaatacatggcatcaatggacagttaactagctatttggagaaaaaatttcagcgggctccaacatgggagggtgatatgcttgatgtaaagatgccaacaaatgtagccaaggatataaagtttctttaatggcaggggatactgaaaagtgtctgaaaatcatgcccacacaaagtggattgagggcgcccaggtggaggctcccaggcccctgcacgtcccatgagaacacaggtgcctggaataccaatctcctagtaagagaagcgtgcacccgcctgttcttgggggactttgtgccctacctggactctcctacctgttctggagaccctggctatgtgcctagtattcatcaggtctaagcaacttgttcaaaacagctccaggactttcttaaatgtttgctgcaaggcaaggtaaattgaagctcaacttctcaggatgtgactgtcttctggcaggaccaggcctcaggcctgctggagagtgcttcctctattctcctatctcaccccttatatcagaatatcttccagccagaccaaagatttatatatatataatgaatattggcaataatagtactaatgtagagaaagctctgagaaaagcatgagtaacacttctgaaaaatgggcaaaggatatgaaaaattcaaagagggcaaaatacaagtgcgagtacatgcatgaagagatactgtcattctcaaatgattatgtaaatgcatttctaaacagtgactcagcatgtttcaatgattagattggcaaagattaaaaacattgagaatctacaatgttagtgagagtgtggtatgtagaaattcttatttacttttggagaatgttagtaaagttatcttgaagaggaatttggttgaaactatcagaagtttcagggtacattgctggtaggaattaaaaaatggtacaaccattttgggaactagatactttcttataaagttaaatatacacctactgtatgaaccaaccagtcattacacttataggtgctcaaggtccatggaaacaaatatccacacaataccatgtacaaagatatttgtagcagctttattcactgtagcttaaaactgaaaacaacccagaaatctgtccaccaaaaaatgcataaacaaattgtggcctacctatactgtccattccatccaccggatactactcatcagtgaaaatgaaggaagtactaatatgtacaacaacacatgaatctcaagggaagccagaagccagagcccatgctgggtgtagaactcttctttatagaagatctagaaaatgggccaggcacactggctcatacctgtaatcccagtgctttaggagaccagcctgggcaacatagcaagacctcatctccactataaacttaaaaaatttagccaggtgatttggcatgcacctgtagtcccagctacttgggagactgaggcgggaggatggcttgagcccaggaagttaaggctacagtgagccgtaattgcaccactgcactccagcttgggcaacagagcaagaccctgcctcataaaaataaaaataaaaatctagaaaatgtaggccaatgtatagtggcagaaagcagatcagtgtttgcctggagcaggatataaatggggggatagactacgaatggaaaagaagaatggaaatattctgtatgttgataatgctagtggccttacaggtgtatatattaatatatattcacaaatgtgtatacataaacacaggtattatatatatgttaagactcattaaattgtacattttatataggcccatttctgtaaattatatctcaacaaaattgattttataattacatcaaaaagatacctgtattgctatgtttattgcagcactgttcacaatagcaaagagatggaatcaacctaagtgtcgatcaatggatgattggataaagaaaatatggtgcatatacaccctggaatactactcagccataaaaaagaatgaaatcatgtattttacagcaacatgtgtggaactgaaggccattatcttacatgaaatatctcagaaatggaaagtcaaataccacatgttctcacatataagtgggagctaaataatgtgtatatatggacacagagtttggaataatagacattggagacttgaaagggtgggagggtgggagggggtgagggatgagaaattacataatgaatacaatgtaaatacactattcaggtgatggttacactagaagcccagattttaccactatgcaatatatccaggtaacaaaattgcacttgtacccctcaatctatacaaaatttttaaaaatggaaaaaaatgatttaaaaagttaaagaatgcattctctttgatccagcgattccacttccaggaatttaccgtacatagatattcacacaactgtgcaaatatgcaggcataagggtgtgcattgcatgatagtttgtagttgtgcaaccattgaaaatggccaaactatccaccaagagggcagtagataaacaaccaaaggtgaaagagctgctatagcctgtcctgtaaactccaagagggctgtgtctccagacctcacacagtgctgggcatactttatgcagggatgtggaaagggagtcaaggtatattaggtaaaaaaaaaaaatcaacttttaacttttaggaatagatgaacccactagaatggaactatttatgttagagccagaattaatttggtgtctttaggattatgtgagaagactgagggtcttgtaggaagactttgttcttgggtgaggctgagacatccctgggagagttgaaacaggatgagctgctgtttgctgcagggagatcaaaggaagagttcagatgcagacaagtgagggctaagtgtcccgccatagaggggtttagtccactgcagtgccctgtgacaggggcctcagagaaccacagcaacacagggctgtcagaaagggaaaagggtccatgccctactcactgggacctgggacctgtgcaggtggagccaaacaaggttggttcaggtgaaggcaatgagcaccaggggtttggcctgcttggttcctatccaggttgtcatcggctccagcaggtctcatccaaggggcagacctccaagacctcagcatttcagcagcagtcggagaggtgggaaagagcaaaggaagcaaaagcagaactaacatgctggatgaaggaatccatttcccaagtccccagggtcagaatgtcttcatctcttgagggatagattccctgcaacagaaacaggactggggccagactcatctcccctctctccatctcccctctctccatctcccctctcttccccatctcctcttgatgggaaaggcccaggctgagtgcagagcaagcaacgaatcattgcatgatgaggaaggatggtgcagtctcttccaggcctcgtgctctgggcttccaggcctggtcctatagtcatgaggctctggaaccggggaggggaggaagtctgtatttcaaagtcctctgtgcccttcctttgcatggaaggtgacggtttgtgttgttgggatcaagttgacatcactaggaaggtgtccttagtcataagggtcatggagaagcagtaacacgtgccactggattaatggtcttggtgctggaagacagtccagaaattttttggaaggaaaagtagaaaagtgatatcaagccaatgcttatccttggtctgtgactttcagagatttccaggagctgctgtttcttgatttgagttctagaggctgctctggcctgtaggtaggacagacactgtaatttgaccccagagaccatgggatgttcctaaaagtagttatccttggctggagcactaactggtgtcaggagagctggcaaacttcttggatggtgtactacgttgaatagtgactccctcaaaattcacgttcatctagaacctcagaatgtgactttatttggaaacatctttgcagatgtggtcaagttaaggtaacatcatattggattagtgtgggccctaaagccaaggtctggtgtccttatgaggaaagagagatttggagacacaaacacagagacacacagagaaggcaacgggacaacagaggcagagattggagtgatgtgtctgcaagacaaggaagtccatggatggttcgttccagcagacattgaaaggggcaaggaaggatccattccaagtgtcttaagagagtgcctggactggttggccccttgagttcagatttctagccttcagaacagtgaggaaatatggctgggtgtggtggctcactcttgcaatcccagcactttgggaggctgaggtgggtgtatcacttcaggccaggagtacaagaccagcctggccaacatggtgaaactctgtctctactaaaaatacaaaaattagccgggcatggtggtgcacacctgtaatcccagctactcaggaggctgaggcacaagaatcacttgaatccgggagacagagactgcagttaagcgccactgcactccagcctgggtgacagagcaagactctgtctcaaaaaaaaaaaaaaaaagaaaagaaagaaaagaaaaaggaaaataaactaaactgctgttattttaagccacccaccttcttgtgccacttaatggcaaaccaaggaaacgaatatataatacataatactactaatatataattctgatactactaattctaatatataatgataaccttagttcttgtggaaggaggtatgaaggagtacatcacattattttcaagggcaaacagtggtggaaaaaaagctgaattttaagttactaaatttagagaattagtaggaatttgcatcacacgagggtgtcttttactgtcagatcagcaattagagcagaggcttggatctggtagacttggggtcaggtgccagctccctcacttaccgtctgtgtgaccttggggacactgcttctctgggggtcagttttctcatctttaaacctagaacaataatagtttcatctcaaagtgttgctgcgagaattatataaaaccaaggtgtggcgcatcatggaggggtctggcccctcaaaaatgcttacacgtagcgttgctattattgtttttaagttacagacacaatgattttttttttcaataaacttgattcagttggcacacatgcacacaaaatacatagatcttgaccaggccagcatgtggacacagtctttccagagctcgtgagatgacaaatctctttattggggtattaatgtcaggtccaggagattcaatattcaatccactcatcaaggtcgtctgtgtagacagccattcactacctatagacgctcctcaagaaacagatgctttctggttttctgccaagaatgtcaacatcagattactcctaagtatcactcatttccacgtgaattagacagaacagtgttaagtggtttggagccacagctggctctcaatactgcttcaactcacactctgagaagaacgacagttgactgagccagcttccacacctctcaagagagtttgctgttttattccaaggggcagtaacaggaacatttctgcttgctgcggcccctaaatgtgcagcattctttagaccattatatggtgctttccccttctcagcgttcagaaacgttgagaaggaaagagcctcatcctattttttagcttcttggaggttgcagttgcttatcttttttctccactgggatatatttttctcttgcccattttttatgctgaattttctaaactcctttataatgcttttgctggtgagttacctttggaatgaatcaagtactttcactttctctatccagaagggtggttcacatttgctaccagtctattgggaagatctgggctcaggacaccccccacagattactgcaatactttccaaacatgtgcatttatcctgtaaccaccgattactgtaacactttctaaagatttgcatttatcctgtacctatatataacttaaggtctgcttacactctgaagactataaatagattcccacctgttgggctggtttccaggaaagatgcagggcccaggcacctagttctctcattggttaaaatgtaagtattagtaccttctttcttcttcttttttttttttttttttgagaagaggtctcgccttgtcacccaggctggagtgcatggtgtgatcatagctcactgcagcattggactcctgggctcaagcgatcctcctacgtcagtctcctaagtagctggaactataggcacctgccaccacgcccatctaattgttttatgtttttgtttgtttgttttttgtttttgtagtgatggggtcttgctatattgcctaggctggtcttgaactcctgggctcaagtgatctcacctcggcctcccaaagtgctgagattatagttgtgagtcaccatgtccagtccccttctccctctttcttttcttcttaattaaaagtaatttacatgacagcaattcttgtacacactacccagatttaatgtgttaacacttcaccttattgcttcaaacattgtagatacaacttaagaacccctgccctcctctttcttgtaccctcagaggtaattatcatcatttatattttcccagaaatgtttttgtatttttgctccacttaatggctgaggggctggggaaatggtattatattcattgccatttccttctttccatttcttttggggactctgtgctttttgaatgaaaggaaatacaaagggacttcacaaagttcatggaaaaatggaattaaaagctaaaagtaaaaaaatatataaactttatttctcaacatttgctccatcaagttgaagacacttgtaagcgatgatactaaccatttagttcgtccctaaaaaactgagggtcagtgccaggcatggtgggtcctgcctgtaattccagtactttggaaggctgaggcaatattgcttgaagccaggacttcaagaccaacctgaactacatagcaagacccccatctctaaaaacaataaaataaatagccagatgagttggtgcgtacctatagtcccagctacttgggaagctaagacaggaagatcacttgagcctaggagtttgagggtgcagtgagctatgatcatgtcactgctctccagcctgggtgatagagtgagacttcatctcaaaaaaaaaaaaaaaaaaaaaaaaaactgagggaatttaagcatgtcagtatagtcttttttacattagtaattgaagaaaaatggttgtcttttaacaaaaaaggcagaagaagccaaatcaggacagtaaggtggatgcctaatggtttcccaccaaaactctcacaaaattatctttgtttgatgagaggaatgaacaggagcactgtcatgatggggaagggctctctggtgaagctctcccaggtgtttttctgctaaagctttggctaaccttctcaaaacatctcctaacaagcagatgtcatcattctttggccctccagaaagtcaacaggagaaatggcttgagcattccaagaaactcttgctgtgacatttgcttttgatggatccattttggctttgactgggccacttccacctcttggtagccattggtttgactgtgctttatcttcaggattgtactgacaaagccatgtttcatctcttgctacaattcttcaaataaatgcttcaggatctggatctcactcatttcatatgtccattgagagctctgcccttgtctgcggctgatctgggcacaatggtttttggcacttatggaatagaaagttagctcaactttaacttttcagtcataattgtgtaagctgaaccagtccagatatctgtggtgttggctattgtttgtactcttaatcatcaatcctcttcaattagggcatgaacaagatgaattttttccttgcaaattgatgtggatggcctgccactatggacttcatcttcaatattgtctcatcccttcctaaagtgagttatccatttgtaaactgctgatttcttcaggacgctgtccccatacacttctcataaagcatcagtgatttcaccattcttccacccaagctccaccataaactcaatgtttattcttgcttcaattatagcaggattcatgttgctgtgataggaactcttttcaaactgatgcgcctcaaaccagatcctgtccagccatgttacaacaagttagtgtgtgtttattttggtgcaaaaaaaaaattgaaatccatgcattgctttttcagaatacacattttctatgaacttcttaaagaccccctatggaccctgagagtcagttattcaagatgtggcttattagggtctctgatcaagttgcaaatagtctaaatttaatttaaaaagaaacaacaacttgggttatagttgaagggtccttttgacgggtccgtcgagcccccaagtattgcccattttgcttaaggtcaaagactgaatttataaccctaaattagcctctgaaaggagagtgaagtcaatttaagcccacaagatttttccagtgtgaattgtttgctcaatgctggttcaagtgcctaggggggatacaagaaaatggcaaagtgccacgtaaaaattttttttttttttttgagacagagtctcgctctgtgcccaagctagagtgcagtggcgagatctcggctcactgcaagctccacctcccgggttcacacgattctcctgcctcagcctcccgagtagctgggactgcaggcgcccgccaccacacctggctaattttttttttttttgtatttttagtagagatggggtttcaccgtgttagccaggatggtctcgatctcttgacctcatgacccacccgccttggcctcccaaagtgctgggattacaagcgtaagccaccgcgcccagcctaaaaaaaatttttttttattactttattttacattccagggtacatgtgcaggatgggcaggtttgttacataggtaaatgtgtgtggcatggtggtgtgctgcacctatcgacccatcacctaagtattaagcccagcatgcattagctattttcctgatgctcttcctccccttaacccctcccagtccccagagtgtgctgttcccctccctgtgtccatgtattctcattgttcagctcccacttgcaagtgagaacatgtgatgtttggttttctgttcctgcattagtttactgaggataatggcttccagctccatccatgtccctgcaaaggacataatctcattcctttttatggctgtatagtattccatggtgaatatttaccacattttctttatccagtctatcattaaatgggcatttgggtatttgctcttgtgaatagtgctgcagtgaacatgcatgtatctttataatagaattattcatattcctttgggtatatacccagtaatgggattgctgggtcaaacgttattatttctggttctaggtctttaaggaattgccacactctcttccacaatggttgaactaatttacattaccaccaacagtgtaaaagtgctcctatttctctgcagcctcaccagcatctgttgtttcttgactttttaaaaattgccattctgactggcatgagatggtatctcattgtggttttgatttgcatttctctaatgatcagtgatgttgagctttttttcatgtttcttgggcgcatgaatgtcttctttcgagaagtgtctgttcatatcctttgcccgctttttaatgggttgggttttttttcttaaaaatttgtttaagctccttgtagactctacatattagacctttgtcacatggatagtttgcaaaaattttctcccattctgtaggttgtctgttcactctgatgatactttattttgctgaaagcaccagttttcggaggattgacatatcaattaaaatgaaaatatttttaaaagagaataataagagatagaccataatcaaacttgaaattgcatgggggaatatctgagagccaaaggaagtaagaaaagagtgaattggggtgacatcaggatacgagagaataacggcagagcagaaatgcggcaaagtgagaggaagacagtaaagaatgatgaaagtcatcctctaggctgggtttcacttttctaaaaactttcctttgaataattcacacagcactcgacagagtgtcattttcgtttttagaccacttaataaatatcgattgtaatggcagaaaatgtaattaaaaattaaaatgctattattcttgagatactgagcctggcttccaaatattatttggtaaaatgttctcacagtcttggacacaacttcagcatgacagagtgaagccttcaatatcacttgaataaatgctgaacagaattgtaaagtagagtcactaaaagaacaaatttctctccatagtgcatttgcttcttttacatgtatactttcaagtaggtatcagaagccatcttttatattttaaaaggctctcctaggaaattttcagaagaatccaaatatcaacatatcctctaattttaattcttccccattagcagcttcttttgctgtgatggaagcaaagttttatgtatagctattttttgtttatgttctcaatttgactgtaaagtaaatttcagtaaattcgatattttttattacttctcttgatgaaattggaggagcatttatttgggaaaatgctatcaatatatagatttgcaaactttatgtgtagcatgacaagctaaggagctacaggctgttgcaagccaatgtcttttaaattagcattttatttatttatttatttatttatttgagacaaggtcgcactctgtcacccaggctggcatgcagtggcgccatcttggctcactgtaaccttgacattctgggctcaaacgatcctcacacctcagcctcccagctggctgggactacaggcatgcaccatcatgcctgactaattttttaaattttttgtagagatgggatttcgccatgttgcctaggttggtctcaaactcctgggctcaagtgacccgcccaccccagcctcccaaagtgctgggattacagatgtgagccaccaaatttttttttgtattaaaaatgatacatggtgattctagaaaaattgacaatgtggaagttttttaaaaagaaaacagaaatcacccacaatgaatatggataaccactggtagcattttagtttatttccttttagttcttcctattatatatgtaaatttttaataaaattgggatcctattgcaggtgcagctttgtttcctgctttttccactttttattatgtcctaatcattacctatattattaaatattatttagaagtgtgatttttcagtgtctgtataatattttctagtatggacttataattaatttaaatataactgtattattggatatttaggttgttcctaactatttactaaacagataaggcgtttcctttacataaatatctttgcagcacctctgaatatttctataacatacatgtctagaagtgggattatagaggcagacactgtggacattttaaagacttgttaaaccaaatttagcctaatgctgcttccttatatgttttaagttccacctaaaggttcttctgtacctcgtgaactataacctaagtggagttataaacaaactgtagcctactcttgtgtcaatcactgagttttggctaatgaaatgtggccaactgttcaaaacgtgttcaaatacagcaaatgccaatctgtaactaatctggctgtttctgtacctcacttctgccttctgaacatcattttcttttttctgttcataaatcttcttccaccacgtggctgtgcaggggtctctgagcctcctctagctcgggagactgcctgattcatgaattgttctttgctcaattaaactgttttacatttaattcagctaaagcttttcttttaacatactcttaacagttatggccaaattgaattctatacaagatgtcctaattgactttcctaccagcagttgataaggtgtctattttactgcacccttgccatcaacacatatgatttttaaaatatttttcaagccagagcctcgagatggatccaagaatcagagcttcagagattcagtgcccatatcagtgggtccaaatgaggttgtgaagggcacctgagagagcaaaacaggctgcagacacagaaagatttgaaatcattcccacaggtactataatatcccgcatgtccactgagttgtttcatgggccagcaggctgatgtgtgcctaggtgtgctgggctagcctaaaggtgcagagcagaggtaggcgcctgtaggaaaacagcctgctgcatagcaagagtgacgccatcttgaagcgaaagcaccataatgacccatgtttgactccagcacaccaaggcgttcctgcggctaggtcaagaaacaatacctgtagcatagataactcctcacgaagatgcttatctcacttccccagtggtcttaattttcgcaggaggatctgagacatgaccagctgcatgctttgccctaaaaacttgccatggaaagaatacttcttggagggccagggcagggatccactctctcagggccaccagagacatggcttctaccataagtccctattaagtgtttctttcgaaaaaagtggatttatcggcctccttctttggcctccttcttcagcctcccagctccctcagccttttggagtaggtttgcacagacctgctccctgcagaacagcaccacaggcgtctttctgacagctctgcctgatttctctttcctcttccttttctataggtcctgttggcacaacctactgacaaccctacaacaaccaagggcctagtctcccttctgttttaagcccatcaagcaagaacaaaagggatataaacacttcctgttccattggaagtaagcctggaatgaagtcccaattccatgccgaggaaccagtgagccccaaaataaagcgatgtctccatatcacatcttgaatcacctccatttccaaccagattcagaatccaatgctcagggataagggagagcgtccagtagtttccactggcctcccttccgtttctcccttattgtctgtccctccaccaggggtatggcctataccagcttgtgaagagctggtggctaaacgttcaggaattttcagaggcgattgttaaatatagttattaaacaattaaatgatgtaacccttccactacataaactatattaaaacaaaggtaataaatacccaaaactcaccactttgtgatcttactgcactttactgtcattgacatctgtcaaatctgtacgggggaaatacgtaatgctgtgctactgttcaactccaagttcagtgatgtcagggtggtagcttgaaatcgatggaagtgaaagtatttacactgtagaaattggccaatgatataaaatgggccttgatttactgttttgttgattgtgtagacttaagaaaatgataaaatgtcaagaatgtggattaaaattaaaagtgtagcacaaatgcagctgttccattctgaatagcattaaaaatttgaggaaataatattccagtattgaaaactattatctaattcgggaaagcggttgctcctgtcatgatgaattagtgacattccaacattcatcttcattgtttcactttcatcttacatgttaaagtacatgaaaacatcaaccaacattcatatcttaaccacactcatccgtcaatgatatgagcaacttctttaccgaattggaaagttattaagcatttattcatagtctgattttatgacactgttgtcgatgacagaattattataactgatagtggattttgaggaagttgcaagtcagagtaatatagacgtataaattgaaaactaaggtaaatatgttagcttgaaaattttttctataattacataaagaaattaacaaaattttacattaatgctcactcagtcttgtgacttttactgatgtaacatacaattattttttagattcagatccctaaaatgccaaaatgatagagtgatcttgtggtaaagctgaaagagatttcagtttaatgaatataatgtatatgagagtgcgaaagtctaatggtagatcacatattcaatttaatgaaagcaatttattggggaaataggtatcagattgggatacaactccacttactcccttttcaaatgatcattgacacaaccataggttgactatggatataagaatttgacaaaaagagcaaaactttctgtgaggatcaaatggctatatggaatttataataaagagcattgtatatgttactattacttgtaaactgtctgatacacactcttttttaaaatttttttttatttttttgagacagagtctcactctgtcacccaggctggagtgcaatggcgtgatctcagctcattgcagcattctcctcctgggttcaagtggttctcatgcctcagcctcctgaatagctgggattacaggcatgagccaccaagctcggctaagtttttgtatttttagtaaagatggggttttgctatgttggccaggctggtctcgaactcctgtcctcaagtgatccacgtgcctcgacctcccaaagtgctgggattacaggcgtgagccactgcacctggcctacacatcctttatatcagaaaaatgtataacaaacacatatacttttttccagagagctggctgttaaacatttaccggcaccccacagctccccatccaccttcaccttacgttgactgccctatcagtttgaatttctgtctaggttccctctcctcagttctgatcacatttcatattccaggccattgcctttacagcaacacttcaatgtcaatgcgattgcacttggcaaaagatcatgtgcatgtcttggctctgcacagcatccttccccgggcttgactaggctgcagtgacccccaggtctctggctgagttcctatcactacagagagctcttccaagactcagccattgcttccaagtgttgggctctagaatttttgactaaattttaaaatagttgtacaaatgtcatatcatattttttccccagaaggagctgccaactgtatattctctagccttgggaaatcttacgtttgatgctttaaatttttgagaatgctgagttctgaacagtgcatgatgaatttgccttatatgagtgtttttgagattgagcagagtctgcttagcccacatatgcaaatacatgctggtgtgaagtggtaatttataagaccgtttttttgttccactgggccaatatggctttgtcaaattattccaactgtgaagtctcatgggtcatggtaagaaataatttctctactgaccacagttgagaaatcctaaagaaatgaggaagatgggcaggaataatcagagttatctcaatagcctcctcctctgcattaaatttagcaaagatcattgctttagacaacccaaccctctttatttgattctttttacacggattgatttccaagatcatacatcctcatgctcagccccagaaaactgattgcattggtgtttttagaattaatttatgggcctctaggggccttcaacactgtctcctttgctcaggtaacacaggaactggctgagattttgcagcagacagatgttgtctggaacgtaaaacaaaatgcctatgctaccaaacaaacgcaaggtttgaacaaacagaacatacattatttttaccatatgcatagcaagggggaacgaggtagcttcgtctagctttgggaccagaagcattttattttttatttttattttcatttttatttttttgagacagagtcttactctgtcgtctaggctggagtgcagtggtgcgatctcggctcactgcaacctcccctcctgggttcaagcaattctccctgcctcagcctcctgagtagctgggattataggcatgcgccaccatgcctggataatttttgtatttttagtagagacgggctttcgccatgttggccaggctgatctcgaactcctgaccttaggtgatccacctgcctcagcctcccaaagtgttgggataacagatgtgaaccactgtgcccagccagcattttatttttgtttgaaattactatattagctcagaatcatttactttttaagaatagtgtatatgaatcaccttagagatcaatttggagcataattgaacattttgaatacatttatgccccttagagatacttggtagatacaaatttaacttcctttttccctcaatctaaaacttcatagagaacctgaagaccagaaggagggtaaagtgttgctaatttttatcttgtcttagtaattgaattaagatgaacaaatctcaaaatgcaccacaagctgtaagataaatacctaggagaatagagtttcaaaaagagaattcttgcaacagcgtcgttaagaaaattagcctgattgtaaatattacctattgaatccgtccttatgtaactttgttaatcacacaaacagccacacatccatattcagaagctaaaaagagaaaacagcatatggctgacaaaaggcgtgtacccagtgcaagatttttcaaagagcacgttcccagcaaacacaatgtcctgctagcagttccaaaaggcttaaagtaaggcatcctggggtccagggccagggagctgcagggatgggccctccacctgccttggctgtccagggtgggaggccactggcctctttccaacttgccctgaattcttgcatcttccctggttgctcagctccactcagcgtagaggtggctaaccccaggacctgctgacacttgtcaaatacgtcactacctattattcattctcataagggagaaatttccagcacttattgcagggataggaagttaacaaactggcaggtgaatgaacctgctgattacgtgctaaaaatcagtattttttgttcctcttctcgcatttctcatcttatactgacatgatacaagggtatgtcagggaatgggttttccgccacttctctgccagttacaaactgtgattcagaacctgtcccctacacatatgagagcttagtttcctcttttgtgaaatgaagaggcaggattaaaggatccctggggaccatcacagctctaacaactcaggaactggggctgcacttcacaccttagaggagaattcctttagggggattaaaagcagcccagacatgtggtctctacagtaagaacaatgaaaatgcttatttcagaacccaaacccccctcctgatgaattgtcactctcctgtcaggccagcacacagcattttcatagggctccttcctccttagagcaccttcactccctcatccaattacctttgcttcatatctaagttcaattaaaataattaaagcagctagcagatagttgatggggaggaaagacatggacaatttcctggaagaattctttaaggggcaatataaaagaccaaggactgtgaaaagtagaatttttcttactggaattcccccgtctgggagcccatgcacttcccagatgtttcccatgatttttatgggtgccacaaggaaattaaccaagcaagaatgcccagttacttctctatgcaaacgaagagcagctcatgcaaaaatagccataccccactgttccagttatctatggctgcctagaaagctaacccaaaatatactggcttccaacagcaaccttttattttatttcccaattacgtgtatcaagaattcagtctgagtgtggctgggcgatttgtccattctacacgtcagccacagaggtcatttagtaactgctggatgaactggtctggagaccccaagatagctcatcctgtgtgtctgctgccttgccagggatggctgaaaggctgagctcacctggagcacccgggctctggtggcttaactctaatagtcaaatcctatttgaattttctctttgctacttaccccaacctctccctccttctcctcatttttctttttgtatttataatgaatattatgatgtctatcctagtctgcttgggctgtataacaaaagtagtataccatgggggatgtaagagcaaacatctatttctcacagtactggtggttgagaagtccaagatcaaggtgccagcagattcggtgtttaatttgagcttacctccagatttgcatcctcacatatttcagagaaaggtcatctctctagtctcttctttataagggcactaatgtcatcagaagactctgctcttatgcccaaaggccccagctcctaataccatcacactggggattaggctccaacatgtgaatgaggggcagatggtacaaacattcaggccacagcaggtgttctttttatcacaaagtactacatgcttactgtagagaattaaaaataaagaaaatacaaggaagaaaatgactcatactgccacaatctagaaataaccacaagtaacgtctttccattctttcttctgtgtcatgtacttagatttcaagtttagatgatatttagttcatgtcttgcttttaaaataaacaatcaatgactattttcttaagtgatcaaatatcccttgcaaacactgtcattactattattattattattttgagataggatcttgctgtgccacccaggctggagtgcagtggcaccagcatggctcaccacagccttgaactcctggactcaagtgttttctccacctcagcctcctgagtagctggaactttataggtgcatgtcaccatgcccaattagttatttaaatttttactagagacaaggtcttgctacattgctggtgctgaactcctggactggtgctgaactcctggactcaagcgatcctcctgcctcaacctcccaaaatgctgggattacaggcatgagccatcatgcccagctgcaaatgttattttttaatgctcacatactacttcattacatggaatgccataatttatttatcaatttcctaattgtagtacacttagattgttttcaagttctggcttgggtaagtaatactctgaacacttacacatcaacttttgttcgcattttaaattatttctttaagggagattctgacaagtagaattcctggatgaatcctctcaccttgaaagtcttccttcctttgacttgtgagtcacttttcctccaggatcccattatctcagataaatgcttcctaacataagccttcatgttttcttctgcatatggctggttgttaaagccatggaacctggtaagatgtgccaagagggtttaaaactctaaaaaaggcaagaaaaagatggttttcaaatggcaaaaatgtgtttataataaacccaaagaagtaaatacaaaagttagtaaagactaaaagttcaataaaatgtctggttatgagagctatctccaaatttcagttccataccaaaaaaaagaaaatataattaaaatatgatgatgtttttaaaagcaggcaaaaatataaaatgcttgggaactgacctaatgcaactggagcaaagtaccatgttccttaaaggagagagaaatacagtaaacatgataattctctccagttacatgtcagagttttaacactattccagttaaaattctaatcgcttactttatcgaacttaatataataaatctaaaattcattcagaaaaataaggagaatattgatgcaaagaacagtgagatacaactagctttacctgaaattgattttattataatactgaagttggcaaaatgatatgattggtgaacattttgtaagtaatggaagtacttgcaaagaaaagctctcgggggtcatttttaacaaactcagatctggagagagcctattctatttgtccctcttaaataagaaaacatgttatttcatgatctggaaagttctggatattgtcatacctctgggtcctggggaggcatagctactcactttcaggcaagtggggtatatacaaaatggataaaaaccttcctgtggaccttccctctggtggtgggaaatcctgtttaactcaggtagcagcatctaaagcagtgttggtgactagctcagtgttcgaggctttgagttccaagacaaagtggccgctatcccccaggaaaaggtggagattagcaaagaggttgtagaacatttcttaggagctcaggaaggtagaaaacagggatctgtctgtggataacaaggtgggcctcagaggaaagtcatgcaactggagttcaagtttacaatgtttctacattatgcctcttaagagatttcaggggtaaccatgaacctcaaggacagctctggtggtagagctatggctggaagaggagctggccatcactaaccaagaccgtcaaagaagccacaggcctaccggttgtcttcctggagaatttgagggcaggtgagtgccaggtttttgggaaccaggttggatcacacctaggttgatcccagcaataacctgtgcctaccagagggcagaacatcactctttacctattttctttactgtttcaaaagggagagaaaaggggagaaaacacactctatacccttccccatcacaacagacatctttaaaaaaggaacagcttcacctgtaagcatagcacatattttaggagacctacatttcttcacgtgtcagatgcattcttaacactgtgtgtgcaaacacatttttataagagggcattttcttttaaatacacacagaagagctgactatataagggaacgctatggtgaaaccatttgtaaagcaaataatcacttcctgaataaatctgtctctaagtctggattttcatattttatatcagatttgactaaaggaagtgctctctacaaatgtatcctctgtccaaattagaatttatctgtatccatgcaaccttcagaatataatttccataataagtcaccaaatgcacatgacagtccaactccatcaataactttacctcttttttgccttttattcatactttagaatatacaggtatctgtcttggttagtccaggctgctataacaaagtaccacagtctgggtggcttataaacaacagaaaattatttcttacagtgccagaggctaggaagtccaaaaccaggtgccagcatggttggtttcttgtgacagccacttttcaagttacagactgccaatttcttgttggatcctcacgtggcaagaaagagagttaacagagctctcgggggtcattttcataagggcactaatcccattcatgagggttttaccctcatgtcctaatcacctcccaaaggccccacctcctaataccatcaccttggcagtcaggacttcaacatatgagttataggaatgcaagcattcggtctatagtaatatcttattatacagagagttatgttttgcttctttgtaaaaccttaggacttcatccacaaaagaaggatgcaaatggccattaatatgtgaaaagaagctcagtctcactagtaatcagaaaatgcaaattagccaaaaccatgtacgagttttactcatcatactagcaagatattcataatatcaaatattgaacaagctatgcagaaaatgtataaattgtaacagacttttttgaaggacagtttgacagtattggtaaatgttttaaatacacataccttctgacccagcaatttcacttctatgaattttccctacaaacatgcttgtgcaggtgcacaaagatgcaagtataagcttgctcattctggcacagtttgcaaaaacaaaaaagctgggcaacaaatatgtctcatagtagaaaactggttaaggaaataatgtccaggctgggcacggtggctcatgcttgcaatcccagcactttggtaggccgaggtgggcgtatcacttgaggccagaagtttgagaccagcctgcccaacatgacaaaaccctatctctactaaaaacacaaaaattagctgggcatggtggcacatgcctgtagtcccagctacttgagaggctgaggcacaagaatcacttgaacccgggaggcagaggttgcagtgagccaagattatgccactgcactgcagcctgggtgacagagtgagcctctgtctcaaataataataataataaattatatccatgctacagaatactatccaaaagttataaagaacatgataaaggcaaatgtactgatatgccaagattttcaggacacagttttttttaaaaagcaggttgcaaagcaatgtttacagtctatctggtttatcaaaaaaaatgaaaaatcaaaacactaaaattatataagaaatacaggcggggcgcagtggctcacgcctgtaatcctagcactttgagaggctgaggccagtggatcacttgaagtcaggagttcgagaccagcctggccaacatggcaaaaccccatctctactaaaaatacaaaaattaaccaggtgtggtggcatgtgcctgtaatcccagcaactcaggaggctgaggcatgagaatcacttgaacctgggaggtgaaggttgcagtgagctgagatcatgccactgcattctaacctgggcaacagagtgagactccatctcaaaaaaaaaaaaattaaaaaaaaaaagaaatacaggtgatagacagatagatttagttaaatgtaaacacatattaagaggctgataggaatatgtcttaaaatgctaagtggttaatctttgaagactgagtggaatgaaagaagtagaactatactttttaattccatcttttatattgcttgatttctcataaagggcctatatttatgtcacagtatataattgcataaattttaatttatacaaaatttaggacatttgttatataatatgtaaaaggggaaaaatcactactaaaatacatgcttagtgatatacatactaggtggaaaatactagaaaccctctccttgcacctgattctttctcattattgtaggaaagctaatcttcagttctgggaaccttgcaggaattctgtgcactaaagttcccagggaaagagaatgctctttttcatctttactgttccactaccttaagaaaaatgagccccagaggattgtactcttgcatacctggggaggcttcctgccaactgagcagggtttccaggtaagaaagggcattggctggatgtaggagagggcagagagcttgtctctactagaaccctcaaatggtgttggggaaactgttcagtaggctggacatgggttaaagagagaatcattggcttttttacttcttcatccccctttccaatttccttcctactttgcagtccatcgatttccaacttctccctgttctttcccatgcccagttttctcacaaactcaaagtgaaagccttgcccagccaagccttgtgctcgaggacctaccttccccaccctcccctccatcatttttcttccctcatttactactagtgtaaagggatttcctataagggtgctctagctaatctaacaagccaattcatgcttagatgtactgatttgagcagagacagcctcccatacctccacctccatatttacttaagaatcacctttggctgcccatcaacggtagattgaataaagaaaatgtggtacatatacaacatggaatactatgcagccataaaaagaacaaaatcatgttctttgcagcaacatgaatacagctgaaggacattatcctaagagaattaatgtagaagaagaaaacctggctggacatggtggctcaagcctgtaatcccagcactgtgggaggccaaggcaggcagatcacttgaggtcaggagttcgagactagcctggccgacttggtgaaaccccttctctactaaaaatacaaaaattagccagttgtggtggcacacatctgtaatcccagctactagggaggctgaggaaggagaatcgcttgaacccgggaggtggaggttgcagtgagccaagattgcgcaactgcactccacttgggtgacagagtgaggctctatctcaaaaacaaacaaacaaaaaagaaacaggaaaccaaatattgcatgttctcacttataagtgggaggtaaacattgggtacacatgggcataaatatgggaacgatagaccctggggactaccagagggaggaaagaaaggcgggtgggggaaaaggttgaaaaactattagatactatgctccctacctgggcaatgggatcaaccgtaccctaaacttcagcatcatgcaatatacccatgtaacaaacctgcacatgcaccctcgaatctaaaataaattgaaattattaaaaaaaaaaaagacagccttggcattaaggtattagaaacatggagagtgagaatctaaagcaatagacctgccccacatgctggaattggggtgttctctgggatgacctggctatccctgagatcctatcagagaaggagagaatctgctccacctttcaagtcatgtgatagcagaaagaccactttccaaggaccaaactcacaaccaagttcctacatttcaaggtcaagtcttttttcttggggcatatcagtctcatcacttcttcaatgaagaggattaggccagataatcacttctagctctgatgtcccatcattttattatttttttttaatctgttttcttcctgacagcataggaaggatcatttagccattagaccatttagcataggaaagaccatttgctgtgggagggagtatagtgtaatggttaactacctaggttcaaatcccatgccttcccttactagctatgtgtcttgggcaggttctttgacctctctgaatttcagctgccccatctatataatgcagctgagaaagtcatccacttcctgaaactgtggagagctgaaagacagaaggaacgtatcgcagcatctagaaccaaagaaaatctctgtgctcttggatacagcagtaaggatacacatctcagggttgaatcactttaaatagttatacttagataatatttcaccacttataaaagtaggcacacaagcccaagttcattagattccttaaataacactttgaggatgtgggcaggcatgagcatctccatgacatgagtaagataaccaaagcctagggtgttagctagggtcaaatactgggaggttgtgaagccagaacacagaaatgtcattcattgttcatttattcaaaacatgtgagggcccgctttctgttggacactgtgctacgtataggagtagaaagatgagtaaggccaggttagaggaggaggtaacagtttcccatggcagagctacaagggtaagcctgttacagtgcaagagctagactttggagtcacctgtcccctacctgaatcctggatccagcacttagtagggtattactggggcaagttactaacagctcactgcctcagtttccccatctttaaggtgcagacatgatgtttacttgaggctcagcaatgcaggagtgttgtgagacaatttttcttgctgacatgcaaaagtacttcccaacaatatcatcgtgatgaattcaccatcgtccaggttagagtcttcagcatggaaatcttcaatccctggttttctcggtagcgtgaggtccagttcttaggggagtccttataattagccaatcctatggagactgatggtgaacttccttggtaactcataattcatgatgacaaataaaatgacttatgtctaaaaatactcaagtcatgatgaagagtgcatggtccgtgacaggcaaaccaaaactaaaaacaaatgagctacgggaactgagtgcttaatggcatcagatctttttactaaatatgtttatttccacaacagagaagttgcttcccagtggcacacccagatgcttcatggaagggcacacctctggggtggtgctgggttcagactggcatggtatccacacttctcctgatgctagctttctctaggccctctgttagctcgtcccgcttctgatggacacatttttttttccctttgctatgtcaacaccatcactatgatctcatccatcaggtatattactaagcaagaaaagaggctctgtcttctaaacaattcaaataagacctggtacctcttccacacaacagttccttaggtgtttctgcaaactctaagagtgccttcagatgacaccctttccccatcacccccctaggaggcagaaacaccaaacagaagctaccaaagtggccagacatggtccaaagctttcacagctgggagttctgagagttggagcagagactttgcagccaggggagatgatatattaacatatatctgagtattgatatatttgaatttttcaaatcccagaacgtaaagggtccactatgaatttgcgttccctcttccatgtataaaaccagatctgcccaagataatatttattttcacacatcatttggaagtatctgtttcatttcattatctatgttgaatgaaaaggttatgtcatttggacttgagcctgagcagagagtgccctgtcattataaggctgtaaaaacaacctcctcttcctcctctccacgctgtgttccctggacatctacctgttccaggtttaagttctgggctaggtcagtgacgtctgagaagagagacttcagggtgcctcttgccctcttgttaagcagagcatggtataaatacctcagcagcattctggactaaagctctgtcaaaacaactgctactgagtcgtttaatttgtggaaaggaaatcttatttggaaaaataaagttcttagttccttgcaacattcttacactgcggtagggctcagaatgctggagaaagcacttcgagacctgaaacccagccctgttattagtaattcatttgctttaggacatgtgggagaaaatgcattccttggcttttgggtccaggtaggcagctctgccagcaacaacttggaaacactttggagctgagtgctttgtgggctgcggcagcgtggtaaggaggctgccctcctgccgaagctgcgagggcagttggaaaggcgcttattttgtctggtaaaagcaaatttccaggcttagctaagcatgttgtgcaacctagccccactgaatgcctatgggaatgctctaagatgcccagtgagcatttctttatgcaacagtgcattttcattttcaacgtaagactcttttgagcccagttcttgtatctaaaggtcttatggtgtcagggccacgagattgtgtggggcctatgggtcacaggttaaaatctagagtgggttcctgtgcattctcagtatattctatgccagactatggaaatgaaccctctacaacaggagacaccattactcagtaaatgcacatgtaaaataatcagataatccgtgagtcatcaatatttattcaattgttagtggtaatagagaagaacaataccataactcacctattttggacacttaggtatccaacaaacacttttcattagtcgattattatacaaatcagtggctgataatagaaattcactcatcatttatctttaggctaggattgcatgatgtgatagcctcccacagttcacgtgccttcttttttttgagacaaagtttcactctgttgcccaggctggagtgcaatggcacaatcttggctcactgcaacctctgcctcctgggttctcctgcctcagcctcccgagtagctgggattacaggcaagtgccaccatgcctggctaattttttgtatttttagtgcagatgggatttcaccatgttggccaggctggtctcaaactcctgacctcaagtgatccacctgcttcagcctcccaaaatgttgggattacaggcatgagccaccgtgccctgctggtatgctcttttaaaaaaaaaatttttatttttaatttttgcaggtacatggtaggtgtatatatttatggggtgcatagatgttttgatacaggcatgcaatgcataataacctcatcatggaagatggggcatacatcccctcaagcatttatcctttgtgttgtccaggctggagtgcagtggcgtgatcttggctcactgcaacctccgcctcccaggttcaggcgattctcctgcctcagcctcctgagtagctgggattacaggcgtgtgccaccaggcctggctaactttttgtatttctagtagagacagggtttcaccgtgttagccaggatagtctctatctcctgacttcatgatctgcctgccttggcctcccgaagtgctgggattacaggcatgagccactgcacccggctggtgtgcccttttaaaaaatattttgctcaggctgttgctgaatgagcttgcatttctcaggatggtacacacaaattaatagcatagaaaagtggccaggaagtgtgctgcatctgaagaggaatcgagtttgagagtaacccttctacagcacgtgttgtacaaagtcctcatggctccacccgcgggatgctcagagagcccttctctgcacaacatttcttacactgccttcctgccaataccccagggcacaagcacctggttttttcacccattcagcttgcattattgtagcactttgattccaaaacacaaaaaaagtctttcatatatttctttttattgattcccccaacaagcaagtaaaagatgtgaagtcacatatcactttccatcaagagacagtggtcactgattagtggatcagtccaaggccagtgctgttcacgtgtctatccgtgctccccttgaagggcaggattgaaatcatgctcctctagtttttagacatctagccagaggagggaagagtgcccagaaccttaacattcaactcagaattcaccaggaccatgggaagcccaagcccttccaggaagattccctgagccctttgacctccctgatgtctccctttcgtggtctcctactgcacttagtgctctgcaccccttctcagatggtgacttcagtctcatcctgtcctgtaacgttttcatgagtgtttgtcttcattcagccatgggatacaatgttatattgggtggtcagccctttttgaagggttaacattggactgaaccttcagtgattaatatcaccaattgggatccttaggaaacagactctggaatgaagattagcacacaggaggttctcagggagtgcttgtgggatcagcgcccatggaatggagaggaaggaagtggcattgggcagagggagaagctgagctatgaaggcctcagccgaccccgcagggggctctggagctgagatagctttttagagttgccctgagttggggcaaggggacaggcacctgctcatgagataatcagtcattggatggtggctcctccaaaaaggaagcatgaccttgggaggggcatctctctttggcagaggcaatgccagaaggcggctcacagctgagggctatctgccggcaacactttgagcacctaggggaacaagttcttcatttctgcagaggaatctcagcactgtgatatagcaaccatagcaacgaaacacaaacatagaaaggaaaagtattccaggtagaggaaacagcaaatacaaaagccctatgttgggacaaaaggaactttctatccaccctctgaaggtttgctctctgaaatagacttgattttagacagacgaacaggagaaaaggcatacaaatttattaacatgcaagtgcacataagccacacaacgtgtgaaactcaaagaatggccagatggttgaagtttaaatatcttcttcataggggagagggaagggaggatataggcaattttagaggaagagcaaatgatttttaggggagatgaatgggcttgaataataggcaatagcgtgggctctggctatggagtctactctagtccttcttcctgcaaagatatccggttgatgagatatctggggaaggaattcccaataattggatatcttctggaggatctggcatttaggtagataggggaactttagggagaccctcctctccccaccatatttgctgcttcccagatgcactcaatttgaagtccaaagtggcatatttgacacattttggggtatctatttttttctttttttttttcatttaggaagagggtcttgctctgttgcccaggctggagtgcagtggccccataacaactcactgcagcttcaaattcccaggctcaagcaatcctcccatctcagcctcccaaagtgctgggattacaggcatgagccactgcacctggcctggggtatcattttctaaaccccaacagtacaacaagagttagcttggcatgtgcaagcaatgggaagaaaaaatacaaatccatcactaggaatgtcacaaaagacagggagcgaagagaaggcaggagctgattgtccatgagttcagtatttattctagtagcagtggggagttttttgagggttttaagcagaagagtaacaggatttatttatactttcaaagattgccctggctgctgtatgtgggccataggggtgagtgtacagcggggagacagcagggcacagttgtagcagtcagggtatgaggctacagtaacttggatgagggttatggcggtgaagctgatgaggagtggctgaattcaggatttatcttaggggatagagccaataggacttgctgataggtcgaatgtaggatatgagagggaaagagaactaaagatgactcctaggtttgtagcctgcccaactggggagctggctggagcattagctaagatggggaaaactgggaaagaaagagttagggtgtgggtatgtgtggaacggaaggaagatagaggggcaaagaagggctcaggattgttttgaatatggtaagtctgagattcctgtcttagtttttgttcccagagaaaaattctgagataagagtttgaatgcaagtttatttcgatagtttattgcatttattgttatgcaaacaatattgcaataaacttggatccttggaggcgagccaaggaaacacagattgggtgatgtggaagtaagacagggaagagagggcaggcaacaaggggtgagtttatttaaaaagacaccagtgtatataccagtggagcttaatactgctggagaactctgggaaacagtacagagcatgtgcctaacagtggttccctgggaaaggtaaggaggctggggtaattatcaaccactcccgtcagtgctctgggattaattgattccttggggtgattgattccttggcacttgtgccatgtaggctggagcacagcaggctctgacagccagaggacatcccaggcaaagaggcaggggctggcaactggaagccaggctggtgggcactgagatggcaagggctgaagggatactggtgggcaagaagagtttcatagtcaaggcctgattaggacaccagataacacaaggagaggggctggtattcggggaggtcaagtgcaagggccagtatcacagttcagtctggagtcacaaagagaagacaagcagtaggtgaggcagcagttagatcagaatgacgcccatggacagagcttatgggcactggcacatcttttgaagaccctgagtcaatattaagagtggacatctccagttctagaatctcagtggattgattgagattgggtgcatcatccaaggatgtcagagttgcttctgcggggaacttgcctaaagactgattaggtgacttttcaaggctgcctacaaacctgagcttctatgagttcctcttttacaaatgcagaaatcgtggtgcaagaaagataagaaaaacccttagactctaaaagtgtgctgatgcccctagctaaagaacactgcacacatgaaagctcatcgcagtgactttttccacaaaggaggtgtgaatattttatcaatattcatgaaaaataattttgtaaggtaagcatgtcaaaatatgtcaaacccgaaggtcacattttccagaattctttttgtcccatattatgtttcaatgcagcatcatctttctgtccagcataagtgccccaggcaatggtaatcatttcattacttaattgaagtcctaattatattaggatctattgtcaaatgtggtcctgtcttcattacaacacttcattacaacaaccataagtaaatggaagtgttggacttttcctgtaagaatagttgaatttaacttctcaatcttgctctctttctttctttctctctttctttcttttttttgagatacagtcttgctctgtcgcctaggctgggatgcagtggcgttatctcagctcactgcaacctctgcctcctggattaaagtgattctcctgcctcagccttctgagtagctgggactacaggcatgtgccaccacacctggctaatttttgtgtttttagtagagacggggcttttccatgttggccaggctgatcttgaactcctgaggtcaggcgatctgcccacattggcctcccaaagcgttgggattacaggtgtgagccaccgtgctcggccaaacttctcaatgtttcatttcccaccccagctcatcctacctttctgagctggtaaccaaattcaaggcatgaagtttttttaaccaaaaagagcaaaacctttgtaatttaaatataatcagcctcccatttgggagatactctgcaaacatcttcatgacactctgggacagctgctattgtcctcttggctgcaatccctacattaaaaattcatgtttgtgtcctttctcggttgtttggcttagctttactcttaaaaagtgtttatgggccaggcacggtggctcatgcctataatcccagcagcttgggaggccaaggcaggaggaccacttgagcccaggagtttgagaccagcctgggcaatatagtgagaccctatatctacaaaaaaaattaaaaataattagctaggcatggtggtgtatgcatgtaatctaactacttgggaggctgaggcaggagactcacttgagctcaggaggtgaggctacagtgaactatgatcatgccactgcactccagcctgggcaacagagaaagaccctgtctttgaaagaaaaaaaaaagtgtttatgatcctccccaaatagactccatccttttatttctcactgaactcccagacagaggttcttaacctgaagctcatgagtcctgtgaatttataaaacagctccaaagacgccacagatacctcgaaattatagaaaatttgatctagctttgcatttgagcctctccagggtaaaaatctttctacagcttctaaaaggaataggtaacctaaaaccaggcaaaacaaaacaaacaaacaaaaaacaccccaaaactttgctgttttaaaatccccattttaaaaaaagattatgtaaaaataatttttcttttttcattttgttttcatctttaaaccagctctccagagcctcagccaggctgcctcatcatcgaatcattctgaaatatcttccacaaaccttccccttgtattcataccaaatagctctcagctatactccaaacccatgcaatgaggtagaaaattacttccctccccctccgattcttaaagtggttaatttttttttcctggaatggacattattaatatttcaaatttgttctcattgctttataaactgtaaccatggatccagctctaataaagatgtcccagtgagttaatcatgctagggaacagaaaaactcagggacattcagaatcacagccagaagggggcaatccttctcacatcatacctaagactgcagctcctgtcaggctgcgtgttcatgtgtaaggcaccacaggccccgtggtgccagctcaccagctcatcttggtgccagctcaccaggtcacgtgctgactttaccagtacatgtatgctaattagttatcatccaattgtttgccttcctaaaggaatgagggcatcatctcctagaatttgtcttctaagctcttctcttgaccccggaaagaaatagtggacttcattgttttagggtgtttcatttttggaacacgaattgcagatgggttcgtggttggccgagaggagccaggccgagaagtttggctattttgtcaaaggcaatgagaagccactgaaggttttaagcagaaaagaattacagatttgcatttgagaagtatcagtttggagaataaattagggaggcgtaagatttggaggcacagaagccaggtggaaggctgtttttcaggctagaaaagtggtagtctgttgtaggttatatgcaatagatttggagagaatgggttagatgcagggatgtttatgaaatgggaattgactggcttactctggaggggatgggaagggaggcagaaaggagtcacagatgacatctttatttgtagattgggttggagtagatggtggtgtcaattaatgagataggaaacctagagaaggagtagtttatttatgggggaaaaaagatatgaggaattgaacttgggacatgctgatctggaggtgcctacaaaccattcaagaaaaagtgtcctacagacaattggagatgcaaagcttggagctaggggagaggtctgggctagaaacacaggcccattccctccatggagatggtaactgacaccatgagagtgaagattacccaggggtagggatgatgaagacagaacagggtccgggagggaacgctgaggaagaccaatatgaagacatggatgaacaaagaggggactagaaagaagtcagcagggggactggaaagaagtcagtagaaagatgtgttatcacacaggtgagccttgaggacattacactaagtgaaaagccagtcacaaaaggacaaatactgtataagtccactcataggagacatctagaatagtcaaactcacagaaagtagacaccagttgcggtggctcatgcctgtaatcccagcactttgggagatcaaggttgagaatcacttgaggccaagagttcaagaccagcctaggcaacatagtgagacccccatctctgccaaaaaaaaaaaactaaaaaccttagccaggtgtagtagtgcatgcctgtagtctcagctactcaggaagctgaggcagaaggattgcttgaggcaggaggattgttcgaggttgcagtgagctgtgatcacaccactgcacttcagcatgagcaacagagggagacccagtcttggaaaaaagaaacagaaagtagaatggtggctgccagaggcagggggcagcagggaatggggaattgtggtttaacaggtattgagtttcaattttgcaagataaaaagagttctggagacacatggtggtgatgggttatggccacacagcagtggggatgtacggaatgccactggtctgtgcacttaaagatggttatgataataagttttatgttttgtgtattttacaaccttttaaaaataaaaagtgtgtgctattgtgggagccaagataacagagcatttggggggatgcagtgtagtcaggaagcatgccaaaagccaagtatgattagaactaaaacatgtttatttattaatactttaccaacgtggtgaccactaatgttctttttaaaagtagttttctaggcatggggggcacagaagtcaggtttctatggattaaagactagagggtttccagtcaagttggccttggaagttcaggtcctcctctttgctgcaatataacaaaacataaaaacatataaaaacacatgaaaatataaaaacaaaacaaaaatataaaaataggccagtataaatagcacatacacacttgctgcaataaagccaagctacaaagggtttcctgactgctcttaaatattctcaacagcattatggggcagtatttccttgtcctcaatacaagacctgggcctgtggtgaagtcaactgtgaaaggggagtgaggggaaatgagagagggagagggagagggagagagagagagagagagagagagagagggagaaataagccaaaattctaaaacatacaaaaacaattaagaaaggcatccaacaaaatcaacagtcaaaagataaattcattctacatgattgcagtaataaaatattaaactatttaatatatatatatatttaagatctacagagtaataaatgaagaacttacatacctaatagaaattttatcaggcaataaagggaataatgaagagaattgtgaaaagaaataacaagaaatatttgaggagaagatggctgagaatgttccatcaccacaaatatgtccttagatcaaaagtattctccccatgccagaaggttaaataaaaataaaaccacacctagaaataacataatgaaacagctgaataaaaattccagagagaaaatcttagaagctaccagagagaaatagcagtcagattagctaaaagggaataggaattaaacagccccatatatttctcatcagcaataacagaagctagaagaccatgaggtggtatcttcacagtgttgagggtaatataaatgatttttcaagttattattcaagaaggaagacaaaactaagacagcaggaatgcaccagccaccaatattccctattaaaggagacacgtcagcagagaataatgtgaacccaaaacaacagtgtgggacacaacacacaattgtgtagacagacatcaataaaatagttcagaaaatcattgttttaaaaattatctttcaggttttaaaaaggtggaattaaaactctagaaacaattacaaatatgtatgagaaggttcacagcagttttattcatagtggctaaaacccagaaacaagacaggtgtaatattaataggtgaatggaaaaataacttgtgatatattcatacaataaaatattacttagcaaaaagtacacaaaaagactgataggtgaattaatatgaacaaattttgcagaaatgctgaatgaaaaagccagacccaaaagtgcacatcaatactccattatttcatttatacaaagttcaagaacagacaaaatgaattcatggtgtcaacacaggggttatacttagaagggaaatatttgttgggatggattacaggaagtctgtggagtaatgtaaatgttgtatatcctggattacaggaaatctgtggaataatgtaaatgttgtatatccttttatttttattttatttttttctttttgggagacagggtctcatttaggatggagagcagtggcacgatcacagcttactgcaacctcgatctcctgagttcaagcgactctctggcttcagcctcccaagtagttgggactacaggcatgcaccacatcatctggctaattattattatttttaaattttttgtagagacagggtcttgctatgttgcccaggctggcttcaaactcttggactcaagtgatcctcccactttggccttccaacttgctgggattacaggcgtgcccagcctataccttgatttttacaattcattgagctatatgctgaatatttatgcgctttattttatgtaaattgtagctgactttttaaaaaacctgccagcattataaaaattgtgggagaaataatgggtacagtcagtaaaagttgtacaattgatcattttaaactcatgatccctaataaccaaatagtgggaagtaattataatgaaagagatgatgtaaggagcagaagaaaatgcaaacaaacaaataaaacaaacctttcactttcattcatatcttcagaagataagaaaggatgttgtgtatatgaagcaaggtcagggacgctaaacataaggaacattttgaaaacaacaaaaaaagaattgttagaaattaaaaatataattttaaaaacttcaagcaaagtattggagaataaaataaaagtcatttcctggaaatcagaaaaaaaaggacaaagacaaaaatagggaaaaatgtaacaaaattagaggatccatttaagagatctaacatctgaattaggcattcttaacctggggtccccagactcctaaaaggtctgtggaatgagttcgttcataaacccatatggtaaaataatacatctttattttccctaacctctaacaaatatacaacatttcctcttttaaatgtccaggcagccatgtgtggcagctcatgcttataataccaacactttgggaggctgaggtggaaggatcccttgagcccaggagttcaagaccaccctgggcaacatagcaagacctcatctctacaaaacataaaaacattagtcaggcgtggtgctgtccttgtagtcccaggtacttgggagcctgaggcggaagggtcacttgagcccaggagttcaaggctgcagtgagctaaaatgccaccactgcacttcagcctgggagacagaacaagaccctgtctctaaacaataaataaaaataagtaagctgggcgcggtgggtcatgcgtgtaatcccagcacattgggaggccaaggtgtgtagatcacttgaggtcagaagtttgaaaccagcctggccaacgtggtgaaaccccatctctactaaaaataagccaggtttggtggcatatgccagtaatcccagctacttgggagactgaggcagaagaatcacttgaacccggggcaggggaggttgcagtgaaccgagatctcaccattgcactccagcctaggcgacagaatgagactccatcttaaaaaacaaaaacaaacaaacaaacaaaacagtaagtaaatatgtaagcaacaaagcacaactttactgcaactttgtcaccaatagaaatcataggtattttacaatcctattgcggttgttacagatatcttaaaattagtttgcattcaactttatttaaaaatggtagtttattaaatttgctattgtcttattatttaaaaacatatataactctataatgaatttatttcttttttatttttatttttaaaaatttatttcttaatgttgtgtcaactgtacctcaaaagaaagtgtttgtctttgtaatcctatgcattttattttgtgcatctaagaatattattgtgagaaggggctcatgatacaaaaacaagagtatttgatctgaaaaatataagttccagaaggaaagtaagctatcagagacaactaatttaaaaaatggaagaagaaaaatatttttagactgaagaatatgaatttccagattgaatggggctgccctgtgctcagcacaataaatgagaaagatccacttcaagagctagaatagtgaacttgcagtacctgtgtgatcaagtaaagaccccagaaatcttccaaagaggaaacaaagtgatatataaagcactgggaaacatgaggccatcagacttctcctcagcagtactggaagtcagaagacaatgaagcaaagcctctgaaattctaaaggaaatcattcccaattcagaattttatatgcagccaaattatctatcttaattgatagtgagtgttgttaacagaaaaacttcagcagaataaaatttaaaagagtttaattgagcaaagaacaattcgcaaattgggcagcctccggagccagggtgggctcagagactccagcacagccacgtagtggaagaggatttatagacagaaaaaaggaaagtgaattacagaaaacggaagtgaggtacagaaacagccaagctggttacagctctatgtttgtcttacttgaacacagtttgaatagttggccacagttgattggccaaaactcagtgattggcacaagagtagattacagtctgtttatacttacagttaggctatagatcaccacgtatggagaaacctttaggctgaatttaaaatacgtaagaaggcagttttagtctaaacttgatttaacactgtagaataaaaaaatttcagataatccaggagtcaggaaatatgtctcttgtgaaaacattgaagcttctgccccagcaaaatgaaagaagaaatcaccaaagtgcagacatgggattcagcaaatgggtaatccaacatggggaagaagagaaacaaattcccggggttatggtgaaggtttgtcccagatcaacatctctacagcagacctagagcgcaggcaagaggatggaggatgtgtacaaaacaaatgcaaatgatcatttatttgatgtgtttcaacatattgggagatttcatccctggcagaaatttgaggataaacagctacttttaaaataaaacaaggctgggtgtggtggctcatgcctgtaatcccagcactttgggaggccgaggcaggtggatcacaaggtcaggaggagttcaagaccagcctggccaagatggtgaaaccctgtctctactaaaaatactaaaattagctgggcttggtggcaggtgcctgtaatcccaggtactcaggaggctgaggcagagaattacttgaacccaggaggtggaggttgcagtgagccaagatcactccactgcactccagcctgagcgacagagtgagactccatctctaaataaataaataaatcaaacaaaccaaaaaaaaaaatgagaaaaaattgaaagttgtagttttaaaaataatttagaaatatggaggttaaatacccaaagaaaaagctagaagagtgattgattattacctttgggagaatggaatagaacaagatttctcaactttgctgctatcaatattttaaagtggataaatctttgtagtgggggggctgtcctatctttggcctctgtcaattatatggcagtatgtcccctactcccagtcgtgacaatcaaaaatgtctccagacattacaaatgtccgggcaggggattggggaaggcaaaatcacccctggttgagaactattagaaaaggagataaggaagaggagtgttttggttataagcctacttgattctttaagttatgttcatgtaccactgtgataaaactaaaaattaaatttaaagttaataggattcacagagattaatggtaattgattagaaaatataattttaagataatgctgttgacaatagcaacaaaactgtaaggtacctcggaataaatctcaaacaaaaatgaacaagaccataatgaaaagaattatgcccatcattaactgaaacaagaaagcctgaatcagtgaagatgtggtttgttcatgtatgagacaacagaacttcataaagaaggatactcttccaaactcaattgtatattaaattgagttctaataataatttccacaggatttttgctggatttgacaagccaaatttaaaaattcataagaaagagaaaagcgtcaggaatatagaactaatgaaagagaatagagagatgatttcactcatatggggaacttggtcagcagcagagatggaattacaaatccttagagaacggatggcctgttcaataaatggcctgggagaatcagctatccatatgaaaaagtaaagtggggtccctatcacatacagaaatcaattccagctatattaaaagcctaaatctgaaaagcaaactgtagataaagatacaggagaataccttaagagacaaaaacacccagcctggccaacatggtggaaccccatgtctactaaaaatacaaaaattagctgggcaaggtggcacatgcctgtagtcccagatactcaggaggctgaggcacgagaatcgcttgaacccaggaggctaaggttgtggtgagctgagatcgcaccaccgcactccagcctgggtgacagagtgagactcagtctcaaaaaaaaaaaaaaagaaaagaaaagaaaaaagaaacaaaaacacaaattttaatggaaaatatctataaatttgactactttgaaattaaaatttcttataaccaaggacaccaaacataacatagaaaagacaaggtgcagccaggagaggtggctcacgcctgtaattccagcactttgggaggctgaggcaggcggatcacctgaggtcaggagttcgagaccagtctggccaacatggtgaaaccttgtctctactaaaaaaaagaaaaacaaaatacaaaaattagctgggcatggtggcgggcgcctgtaatcccaactactccagaggctgaggcaggggaatcgcttgaacccaggaggcagaggttgcagtgagctgagactgagtcactacactcagtctgggcgacagagtgagactagtctgagaaaaaagaaaaagaaaagacaaggtgctctgaaagaagacacctgaatgcacagaagtgacacagggttagtattcagggtatttaagaacttttacccatcaataagataaggataaacttaattgaaaagaaggtaaaggagtaagcaagtaattctaaaaaggggaaatgtacgtagtcagtaagcataaggaatggtgcttattctcattggtcaacaggaaaaagcaaattaaaataccaataatctaccatttcatacttatcagagccttgattttgttctgatattaattatctcccctagtctcagataaatcatggttctgggaaagattttctcatgctaaaaaaaaaaaaagatatctaggctggggtttcatgctaaaaaaacatgaataaataaataaataagatatccaggccgggctcagtggctcatgcctattatcccagcactttggaaggctgaggcgggtggatcacctgaagtcaggagttcgagaccagcctggccaacatggtgaaaccctgtctctactaaaaatacaaaaattagccgggtgtcgtggtgggcacctgtaatcccagctactcgggaggctgaggtgggagaattgcttgagcctgggaggcggaggttgcagtgagccaagattgtgccactgtactccagcccaggcaacagagcaagactccctctaaaaaaaaacaacaaaacaaaacgcacagatatctagtgatatggtatggctctgtgttcctgcccaaatctcatgtcaaattgtgttccccagtgttggaggtggggcctggtgggaggtgactggatcatgggggcagatttcccccttgctgttctcgtgagagtgagtgagttctcacaagatctggttgtttaaaagtgtgtagcacctccttgctttctctttccctcctgctccagctgtgtaggatgtgccagcttcccctcaacttccggaatgattgtaagtttcctgaggcctccccagtcatgcttcctggtgggcctgtggaatcatgagccaattaaacctcttttctccaaaaattgtccagtctcaggtatttctgtatagcagtgcaagagcaaactaatacgtacagggatgtaacagttttatatatgttcaggtctcacagtgttgcctggaactatggcagccatcttatgagtgtgggtggagtgggtttgaagtgaagacactgacgatgagatagaagaactgtggaagaaacgtggtccttaatgacatcgttcagcttcggaattaaccagccctgggactgcccaacaagactgcatgtgttgcaggtgtgtgtatgtgtgtgtgagagagagagagagaaagagagaaacaagaaacaatttcctctttgttgaagacattttgagttgggttttctaataccacaaggcattatttaaagcaacatttctttttcttttttttttttttttttttttattttctgagacagagtctcgctctgtcgcccaggctggagtgcagtggcgcgatctccgctcactgcaagctccgcctcctgggttcgcgccattctcctgcctcagcctcccgagtagatgggactacaggcgcccgccgccacgcccggctaattttttgtatttttagtagagacggggtttcactgtgttagccaggatggtctcgatcttctgaacttgtgatccgcccacctcggcctcccaaagtgctgggattacaggcatgagccaccgcgcccagccccctaaatcaacatttctaataccacacgtcaacgtttaaatcatcctaagtgtccctgatgctacactgtgaactgctcaagataaggaaagtaccttgttcatcattattctctgcacttcacacggtgctcagcagatgctaaaaaattatttactgaataaaggagagaatgctcagactggctctagaaaatattgtaaagtaagtgaattttcttggtatttctttcttggtcccctcttctccttcatcactccacacccacatcctcccaccacaaccacaagggccccgcaaattcttctcatgcaaaatgacaagagaaaaaaatcttccttctttctctatgccccttattaaaaacacacctcttttattcccattcccttagccccattcattgcaaagttaatattgctaatttaattacaccaaaattaatttcttagattccctgtgagatcacatttccatttttacagctacctgcaaaacccctcaaccaaacaagaagcccatgatgggcagatggagctcaatggcaaagtgagtgggtgagatgttgaggggtttcagggtcttcttctagcacctcctagcatccaccatagaggcaatcttgcctctcactggccgccttcctatagaacccatcccagctgaagctcatgaaccagggagtgacacaggcatctccaccagatccaggtggaggagggagtaggcagcactcacactgcacccgggggtggaacagtagtgtgtgaagagaggaacatgaaattcattattcaccggaactgggccagcatttgaactgtggctagcctgttgcccaactccaggtggcgccactcacggggagttttatttccagaaaagcccttcccagaaaacagggcatgtacggtgccccctggagttgtgtgaggataccctactagtttggattcaacaaacaattgagatgagcatggtggcctagagacgatctctcttctgttggtgagtgggcgaactctccagaaccttccaatgcggcctcttgctcaacagtctttttgtggtgaggcagtagagaaatgaaagccatacaggtggagagcagagaccggaggcaggaaacatccctttaaggcggtgttctcagcctggctgcatactggaatcacctgggaagccttcaaaaatactggtgcctgcatgtgatgtaattggtctggggtggggttgggggcagcctggccagccaggatcttgacacactctcaggtgcaccagtgagcggctagcattacctccactgttccaagtctgctttagcaggcaccacaactcccacctaccccaaaccttgtcttgcaccagaagtgtttttactgtcacctgagtttatgctttttaatacttcatgctcattagtgaatctagtagctaatgagcactcctgtagcacaagttaatgctgtttgtccattttttgataggaagaaacccagcactgagaatgtaggtgtttatgtttgagatttacagcgtgcctttcttctttggtggttattttgattcttaaagtgaaaatgttctttctgcctattccctgaggacagagcaagaagataagaatttgagtactgtaaaatgatatggtaaacactgaaaaggactttgaaagttgaaattgttaaacattgaaatggattatcttaggaaagtgtggatcttattttgtagggacctttatttggtatagtttaagttgtgcatatttaaggcaagagaattaacaaaacaatcgcgtagatttttccaaatctgtgacttgaaggatgctacatacagcttccactgcccttcgcgtttctctccgaaacacatttagtaagcagaagtccgtatgcacgtgtgtgtgtattcatataggcctggatgtgcttttaatcccgcaagtatagccatctacagtgaattcagcatcttttcatcaggatgatgcctttacatcatgggtgtccaaccttttatatttcaaaacagattgacaaaatcctagcagggcacagtggttcatacctgtaatcccagcactttgggaggccgaggcaggcagctcacttgagctcaggagttcgagactagcctgggcaacatggcaaaacagtctctatcaaaaatacaaaaaattagctgggcatggtggcatgtgcctatggtcccagctactcgggaggctgaggtggaaggatcgcttgagcctgggaggtggaggttgcagtgagcagagatcgtgcaactgcacttcagcctgggtgacagagtgagaccccatctcaaggaaaaaaaaaaaaggaaaagaaaaacaaccaaaatcttgtacaaactgcacacaacagatacatttgagttaatttttatgtataataaaggcaaccagtaaatagattaaggctggtttgatgaacataaaacaccttagcttttgcttcgaaaatagtgacaaacttactaaaagttgcaaaaagtaaaatagcatagagaattctggtatatcctttactcagatttgcctattgtaaacattttactcacttgctttagcatttgtgtgcactgcgtgtgtgtgtctttctctatacacacaaacagtatttttcgaaggatttgtaactaggttacatatgtcatgactgtttacccctaaatacttcagtgtgtatttcctaaaggtacagatattttattatgtgactatagtacagtcactaacttgataaatttacattgatttaatagtctaccatccttgttccaattctgtcagttaacctaatatgtcctttatgacatttcccccctccactataggatccattctggagccagttatttcatttcatttttatgtctcttcagcctcctttagtctggagcatttccatagtttgtctgtctcttatgccattaacatctttaaagaatacggtcctccctctgcctctctctttctttttttttgttaaaaaaagaacattcaatttttattttattatttagttaatttatgtattattatttatttattttgagataggatattgctctctcccaggctggagcacagtggcatgaacatggcttactgtagccatgaccttcccggctcaagtgatcctcccacctcggcctcccaagtcactgggactgcaggcatgttccaccacacccagctactttttctgttttctgtagagatggggtctcagtatgttgcccaggctgatttcaaactcctgggctcaagtgatcctcttgcctcagtctcccaaagtgctgggattacaggtgcaagccaccaagcccggctgactttttttctgcaataggacagtcttcattgtgtgtttgtctgatgtttgcttcagtgtgaagagattaaggttctgcaccctcagccagaatgcacaggtgctgtggggtccttctcagagcatcacatctcgaggtacatctgatgccctcatcggatgcctgtctgccccttgttgggaatgttaattttgagcactcggtctaggtgttgcctaatttttccattatagaatgactgctttcttcctccccttgtaactaagatgctatctctggggagaaactttaagactgtacaaacactctgctcctcatcaaaatgtccacctagacttagcatccattcatgattctcgcctgttccaatttttacctaatgtttgcaaagtgaggatgttttagcttcagcaccctttccacacttatcagttcatctgtagccctggtaaacaagacagccctccctcatctcctctctgtctccctatctatctatctatctatctatctatctatctatctatctatctatctatctaaattcatgaattcctgtttttaaatcgtttgtacatggttttcatgctaaatcattttggtgctcagattgtaccagctttggctaggggagccccttcaaggtggctcacatgtccccctgctctgccccatccttgattggagcatttccttacattctggcctagaggactatcccaggccagtactgcccttaaacccaggcgagctcctggtccagcatctcaggacactgagtgctttaaaaccaccatcctcataattttcaaagtcctcctctggctcctggcactcaccagggccagcagtatcacctggctagggtgccctgtctcccctttggggtacttctccgacttcactctctcctctccttatttctttcatggggtcactcaagattgggctaccagaatgtgctgacacgcttatttggggtgattctcattcatttggacccatgattcattcagagctttgggctatctgctgtcttggctctcgcacttgagtccctgtgtgcctcgggatcaggacccaaccgtccgtgttctgctctacagcacgtgggcctcaccatttcagccaagggctggtgagacccttgctctgttctcagagttggccaaactgcaaggcctaggggaaaagtcttaaaaggctgccctcacttctgacactatttgcaagtttagggtgtcctaaaaccaccctcagttctaatgattcactaaaagggctcactgaacttattgaaagctgttatacttggtcgtggtttataaagaggaaaaggcacagattatcatcagccaaggggagcgacatgcaggcatcatctgggaggggtttgaatgcagagccctggctgtcctctccccatggagtcatggacagtgctgccttcccttggccacagtgtgtgccaatacagactgaggatttccagccatggaggctcgccctgagccttgggtgcccacagcttttactggggcttgtgcctgtaagactgacctttagtctccaacttttcccagaggtcaggctaatacgtttagtctacttttagtctctagtccctccagaggttaggactgatatggagaggcccaaagtctctctcataaattacatatttggactgtctggcagtcaaagcacccaggcaaacacaaatactcccttctggcaggacgtaccagggttatcctggatatcacttcccagtagctgacggcaaaggccagatctcaacttgggtaaggtaaattctccttccattctgtcctctcttgccctctggtaagtctgaagctatcatagaagagagatcagcatttcctgcctaagtgacactgcccttctcacaccacccatgagcctctcatgtttccttcgtgctgttggtggtctctgcaaggcaagggtgtagccaatactgaaagagtgcaaagtccaggaatgcagtgattcaggcctaaggaggtcaagaaaagacatggttggaagacacgccattctacttttaggctataaaattcagatggtaaatttaacatgtgcagaatgcaagtagtagtttacatttttctgcatcctttaggcatttgagaacatcatcaacaaagcacagaacaacatttgattgagtcaccagaagccagcattcacaggtggctcagtggatgatacaacatccaatgtgagtaaatggtaccagggaactgcagaggcaagagctctatcgtttcaatactaacaggatatgaagaaccatggcattatgagtagcaagagttgctcccttttctctgatacaaatttagccagggatggcacttttgacaataaagaacccgaagagacagtgcctggaccctaggaaggatcttcatgggtacagtttgaacaatgaacgtaggtaggaagctcttctctatcagtctaaagacattgctatcccttacctgatctcatgaattttgcaatacatttttaatcaaatattttatatggacagagagtttacagaaactatttgtctggtgtcccacacatgtgggggtagctgcattcttgacccatcttgtaccccagtcctgcaatcaggcttttctccatgaagcctggttcgtgctatcagagaccaagctctaggtattaggtgaacttggtgaacacaaaactttgaacttaggagtcataggtaatatgaccacatgatcattgtggtcttatatcattgtctgtaatgaataattgtcattttgggcagtctagcatgtgaccttctcttcctcctgctagtactccagctgctgtggggtatccctgttgtgtacagtcagagggaagtggtgactctatcactatgggaatgaacggggctacatgctccttctccttactctaacagactgtctaacagactctcctcactctaacagccacagccagttggaagctttcccctaggaatttcagtgttgagccagtatcacagaaatgtgggtaacaggaggtgaacccagtggcaatcgtgtgcagtagaattgttgcttgtgttcctactgcctcaccctctgagcccttttggtttctgaccatttcccaagattcttttcatctattacctgttgattttctaagcccccagtattaatgcaataaatgtccaaaatctttttgtgtaagacagtactggttttgttccttaaaacaatgaatcctatctgaatcagcatagtatttatttctgggttttggttttggttttagttttggttctgtctttgcttgtttggtatcaagaatatctctattcacttagttaaatgttcgcaagtggtaataatttaacagcttgtcttgcaatctcaggatgtacttcaagtcctcccgaagcttaagagtagagttacaggaaatttccatttcaaagtcaaagcatgtagagtatctaccaacagctcagaatccttaactggtgattgtttaattttgagggtgttaataaacagctttcccagccacttaaaattttttctgtttttagaaaatactttccaaatacatcttataacaatatgaaatgttcagtggcataaataaaaataagttcaaaaatctcattgctcatttctgacacatgtattcaaagtttcaaaacagccaagtttattttgctttgcaaaagaaactttaattaagttaatttaaagcaaaagaagttttaaacaaagtgaagggataaacttcatgtcattttcctcattggtgcattatctgcatttataagcatagtaataaagagactgaggtcagcaccaaacagattagccttttggcacaggtaacacattgcagtctccattattatgtacatttgtatgcgtcgcattgtcgtgtatataagtatgtgtttttacagttctaaaaaatagttattaaaaaaatggaaaaggccgggtgcggtggttcacacctgtaatcccagcactttgggagaccgaggcgggcagatcacctgaggtcaagagtttgagaccagcctggccaacttggtgaaaccctgtctctactaaaaatacaaaaattagccaggcatggttgtgggtgcctgtaatcccagctactcaggaggctgaggcaggagaatcacttgagcctgggaggcagaggttgcagtgagcagagattgcgccattgcactccagcctgggtgacaagagtgaaactccgtctcaaaaaaaaaaaaaaaaaaaaggcagaaaaccaaactaacaacaaccaaaaaaacaaataaaattaaattaaaattaaaataaattataaaatggaaaaaataatatttgaattattggcctctatgcagaatccttaaaaatctgctggaaaccacatccctgctggtaatgttctgcttctcctgtttaatttttaaaattgtgctattctaggcttggagaaagtcccacttccttgctgacatcttctctatgcccaggctagagggaaccttctctctttaataatctcttaaagtgattattttcctttcatggcagaaaaagaggcaagacatgcccttctttgactgttcatcattttgacttgtgatgtatttattttagtttattgtcaactatgtataagccttgttttcccaaattaaaatgcattttatgctcctcaaaggcgtgagccagaccctatacaaatatttgccacttgatcagtatcaaattctacttttgcccttcagacccatttttatctacttagtactgtgttttccaaacatgtcacctgctaccttttaccaattttgccttatcttcataccacgtgtgctatttttactagacacctttttattgcaaataaactcattttttaatctaaattaattcctttaaaaggaagctttcaataaatggaaaaccagtattgtttgccacaaatggaaagtaacataaaaataaatatattaaatacattaaaaaaataagcacaacaacactgttacttattggcctttataaagccagctactattgcctttgggttttgagcctaaggaaaaaagggagatcagagagtgttacagaaattcttccttagctaatcagagaggtttggaaagagcgttcgaaagggaatacctttctttctcagcatgggattcaatgttatctgcattatccatacctaactcagaccgccctggtattatgggtggcagatactcgatgaaaagcactcatagaatatgagctctcggagcctgagaaacatgtcctgtactcagcattcttgctctgtgcatctacacaactcattctccaagagcttccctgctctcccttgcatatctcttcatgatctgggccttatttttcttttcttttctttttttttttctcagctcactgcaacctccaactccctggttcaagccattctcctgcctcagcctcccgagtaggtgagactacacgtgcacaccaacatgcccggctaatttttgtatttttagtagaaatggggtttcaccatgtcggccaggatggtctccatctcctgaccttgtgatccacccacctcggcctcccaaagtgctaggattacaggcgtgggccactgtacccagtcacttctcttatctataaaataagagaattctactggatgccttttccagtggcttccagccctgaccttatcagggtctgtaatcacaagatcactggggttaagcattccagacccctgtttaccactaaccatccagcattagatcacttgccagtgttcaccacggaagctggattggtggctcattcttctaatcccagctactcaggaggctgaggcaggaggatcacttgatcctaggagtttgaagctgcagtgagctatgatcataaatgtcaccctccagcctgggtaacagaaacagtattcagcactggctcactcatcttcaccgtggaagatgacactaccctgtcccttcccaaaggaccaaagttaagcactggaaagatcctttttccttatgacaggcaaagtgctcagggaatatagtggggtttgagcttggttctacccccagaattgccactgttctcccaagtgccaatgacttctgatactctgcacatttaatttccataaagggaagggaatcacagacaagctaaatgtattttagcgtgtaatcccagtttaagttagttaaacggcaactgagctataaaatttgctgaaatcattttttatatatatatatatatatatatatatatatttttttttttttttagacagattctcactctgttgctcaggttggagtgcagtggcacgatcacagctcactgccacctccacctaccatgctcaagtgatcctcccacctcagcctcctgagtagctgggactacaggtgagtgccaccaattccagctagtttgtctttttctgtattttttgtagcaacagggtttcaccatgttgcccaggttgatcttgaactcctggaactcctgggctcaagagatttgtcggccttggcctgccaaagtgctagcattacaggtgagagccaccacacctgtccaccagaaataattttttaaaaacagaatgtcagggaccagtaggacgagtgggagtaagaataggcggattgtattgctgcgggtcctccccacttccggcaacatgaacttcttgaagtgccagcttccttatccttccttgagggatttgggctttgctagattttcattttctctcctagcaattaccttaaatatttacagaaactcttggatctgagaaaaaaacttaggaatcaaatttgtatttggtcttgaaaccactaagtaatacaaaatgcaaataggagttaagatttggaaactggcctttatagagcagttcaaaaaagtcttatgggatttacattttaaaaatgagaatttcttataaaatgagagaatagttgggcacagtggctcacacctatcatcccagcactttgggaagccaaaggggggaggatcacttgagcccaggtgttcaagaccagcctaagcaacatagaccctgtctctataatttaaaaaaaaaaaaaaaagaaaaatgagagaacatatacttcttcaacatgattcatattaatatataaagttatcattttaatgtaatgttatctccaaacaaatatctcatatttcattccaagcaatattaataagaatgtttgcctgcaaatatatattgaaaaaccattgactgacaaaatattgacaacacataatacttaattaagcctgtaagcttgtttgagaatgtgtcatatttcaaaactgaacagttaggccaagtcacctggtgagtcttttgtttctttaaaattcagccatgatacaagggttacctacagaatttagagacaaactccaaaactaacatgctcatcatcctaggaacattgtcatgtttcagcaagaagcaaacccctggaactcttacactaaacaagcttctggtgacaggtgaagctggggtttctctttagccactcctaccattatgggacctgcaagtccaggcttgtactggcgaatctcatgttacaatcactattcaagaaggtggttagaaaagagcagagggtatggttttatctaagtaaaatttattcctgcacaggaacaagctcaggtccacctaagaaatgaaacagccattttttttcaacagacttcttttttgtgtgaactcaaactaagacaatcctctgttctttcttgtagccatcaagccaattaattagagccaaaaaactgataagaactctgtgtactttctctccacttgaaggaaaccatacaaaaatatgtacaatctcgttcactcagaccagcgttgggtagaaatttctttgctctatctataccaacaaggtttgctaagcaaactaataaggtaaacagcacagaggaaggggagggggaagaaatattaactactaagagaagcaacttttaaccactttaaagcacgttcaaacaatctacttccttaagaaatcattagcacaccaatgtctttgttcattaaaggagatgaattatggaattattattctaattactaaagaactcttccctttaccaaaaatttatgcaaagttcctagagagacatgacatttgaatggaattcaagttatcaactttgagctacacacaatggatgatgaatctagtttagatactgagtgacaggctcatgcattttagatgagatggcaaattgccattcgggatattaaaaagcttctagaaatgatacaatgtctgggatttccttcaaagtaatctggtgggaaggagaggtggaaagaaggggatatttaaagataaataagattggccatgagttgatcaacactgaagctgatgatgaatacttgagggctcattatactatactctatatttctaaaaattgtccacaagaaaacatttagaaatttagaaatgaaagaatgaaagaaagaaagaaagaaaaagaaaagaaggaaggaagaaagcaaaagaaagaaagaaagaaaaagaaagaaagaaagaaagagaaagaaagaaagaaaaagaaagaaagagactgagaaccatggctcacgcccgtaatcccagcactttgggaagccaaggtgggaggatcccttgaagccaagagtttgagaccagcctcagcaatgtagtgagaccctgtctctatcaaaaaaataaataaataaaattaaaaattaggccagtgtggtggtgtgcacctttagtgccagctagttgggaggcgaggtagaaggatcacttttccaggctgcagtgagctgtgattgtgctattgctcttcagcctgggtgacagagcaagaccttgtctctaaaaaggaaaggaaagaaaataatccacagacggcaaatagacaagtggtcaggaaactggtagggattgcagggatgcagacagtgctatggctgaagggaaagctcggggaagagggagtagaaggccagcagggcaggtgtgggcctgtctggggtcctctccttgtgttgtggcttgcatttttgtccctccatagcagcaggaaggaacagaaaatgcctgccagagcctgccctgggtccaattctgatgaaggcaaaagctgcctgcagtgctccgaatatgctcagcctctgcctctacctccccaccagcaaggccgtgttttcctccacgcacacctcgagcacaccgctttatcaaaccccattcagaaacactctgtgttcccagcactgatgttttttaaaaatggtgacagtgacttcctcatttgcatttcgtgtttatgaccttctcctgttggcttgacatatagacgtggggcagggcaggagtgcagattagagcagtgctgatattacaatgagagagcaaagacagaagaagagatcgcgttcagcttctggcatttaaaagaggattttgcccagggatctagtgtgacaagccagctttgttgagatttaaaagctatgtaatcatgattcacagtttctttttatctcctcccagagactaccaagagccaggcctggccacctgcactgtggagttttaggttagagatggccccatccagcccaggggaatgcaggagaacaagggagccaggcgaatgcagaggggaaggcaggcgctcagcttctcatcttccctccctgccccctcaaggagtcagttggaggcagctttggaaatacctacaaatgtgctaaaaagctggaaggcagagaggcatctgtcctgcctcctgtccatggctctaggctgcctctctccaccaagctggaggtagctccatcaaagtggaagcagcagtacaataggactaagccgatggaggaaggatggcgttccacgtggtgaacctggaaggtcccacctgaatctgaggctttagggaactgagaagacagctggcatgaggctcagtggctggccataggccttgcaatggccaggggtgaggggacctcctagccaagggcaggtggaggaggcagcagaaactcagccaggtccatggtgaaggtaaaaggagaagttaggcttggctgaagcataggcatcaagcaaccagcctggatgaagctgagacagcagtgggtcagttcctagagctgtgatggccagcagacaggcagaagcaggggagcaaggagcagaggctgggggagttggggggttccacccagatccacctcctttccccagcacctcaagggtttctgatccaaacacgaagtaccttcctggaaagaaaaagaagggagagggaggagagcaagggggatggaagagaagacaaaggaggaaagggaaatggaagagagaaaggaatgtttctgtgatgctcatcatttttatataaagaagctgttacaattattgcatcatacttagatcaacagattaatctggagctgttaatattttttgttatgcagtaagtgggtctcttgaggaaggccgtacattttacattttatctgaacatccgggtgtagcatcagtgactgggatcctgcacatagattttctgtgaatttgactgcagttgttgccccttgcagacatttcagctttataactgaggaaagaacagctgtgaccactggggccccagacaccctgctcttgctaactatctcctctggggtgcagggtgctgtgtctcacagttacagccccccaggaatagactgactacccaccacacatgccactgatgcgactctagcatccgctttgtctggatctcacctactgccccttcatcctcaatggatctaaaggctccccttaccatgaccatgtcacagctaacatggactgccacctgcaaagtgtcagtcataggaccaaatgctttgcaacatcatcgtcatcatcatcaccatcatcatcatcatttttaatcctcacatttaccttagataccaataatatcaacattttccaaatggggaaattaaggcttagagagtttaaacagcttgaccccaagtaggaagtgacagagctgggctttgaatccaggtcattcagctttagatcccataaatgttagcagcttccacaggctatgctgccactaggcaatttggggcttaggtcggccagtggctctgtcttcctgtgcttggaacccgggctcgggcagcccctttgtccaggaacgtgacctgctgcccacccagctgctctcttgtcccacagcactcgttgtagaggtccctgcacggccttccatgataccccttcttcttcacctcacatgcatcactcagacctctgacatcacctccttgttggtagagctttctgtgactccttatggcagcaagtcattccctcctgcatgttcccttgccactgagcctgtaggcagtgcatttcccatggaaacataatggcatatttataggccagtcacctgagctgaactaggagctcctcgcagacaggtgaatgccatcttcatctgtgagtttctagactggagaggatgcggcagagaccatgggctgctttgcttaaggctcatccaacccctgaccagcttgtctttcagtacagcagaggccaagaagcagaaaatgacaggtgaagccaggtcccatgtgtagtttagttcctgccaatcaaaagcattcatgcgagactgattacagactgagctatgaagggcaaaaggcaagggccaaggcattcattttgctggagtggatcttggtttttaaactgtcacagcaatctcctcagtcagacagatctatatagtgtgtagtctatttatatttgtaatgaaaaaaaaagaataaatgtaacaaaactgccctcttaaaggttgtttgttaataacctccaagactcaatttcaatttccatccacttggtctgttaaccatgactctctcactttttcaaagataccaggctttgcattgcctcatatttagatcagaaattcttttaaatttgtcaaggattccagctgttagaaagagagtgggaaatagcaatggagaaagacaatgtaatcaaaaggaaggattactgctgggcagcaaaatccaaaaatgtccactgaaaggttgggcattgttgctcatgcctgtaatcccagcatttcagaggccgaggtgggaggatcacttgaggccagaagtttgagaccagcatgggcaacatagggagacattgtctctacaacaaaagctaaagagctagctggacatagtggcacacgcctgtagtcccagctacatgggaggctgagacagaaggattgcttgagcccaacaggtcaagactacagtgagctatgatcttgccacttgcattccagcctggaagactgaatgatatcaagaaagaaagaaaagaaaaagaaaaagaaaaagaaaaagaaatcaactgaatccctcaaatcaaaccaaagaggcaggaatccaggcttgcatgcagcactcggccttatcttttacttgtatattctttattacgtatctctccacttctaggattctgcgcacctacaatatctctgatgtaccagaaaactgtaaaatgcacaggaaagcccctttggggagcagagtgaagagtgagtaggaagtcctggtagaattttaccagcgaggcaaagggaggctcagtgattgattggagatctagtgagctggcagccaaacctcaggcaagtctcctgacacctgctccattgttcctttactgtgttctttataattgacttctcagtaagagttgacaatggccatagcaggtaccctagaaccaaaaagctgagtctcatgaaatcctgcccagctccaggggcagtcagatggggactgggaatgatagaggatggaaagtttttcatctcaagggttttggtgcatcgtgatgggcagtggtgcggaggacgcatcaacagttgaacgaaactttgtttaagaattgtgtaggctgaaagtgattggtgcttgacagtgctttacccactgctaaaaacaaagtcttaattttgaggtggtgccaacagtttgctccactaggatggcagggagcttccttcggtttaaatatttacattgcattttcagcaccactctcagccttactgtagcaggcaaccacttagtgggtgtttgaagatgacaatgccccacgctcagcccttctttagcgttaatggacaagagcaagctgtatgtcttcttaaataaaacagcagccttttgtgacctcccttttctcaggcaacaccaactcaattattcactcagaactgcaaggaacacttcagacgttactcaagcattcatcatccacccccacccccacaaatcatataaagggaaaataatcaaagacatttaaataatcacaatttttaaaagtataaagcagaacagacagttttattttagatcttaagtgaaagtggattaaggttttccttagaaaacatttattggagaatttcagatgaatttcagttttgccgcctggtgtcgaatcctgctttttaaaccttgtctctgcagagtcacccctttttctccagtcccactctcactgctgttggtctgaccctgtatgtctgtgattggatagacagcaactgtccctaggaaaggcatagcatgggaaagtgtggatgtctcagtgtccctcctgagattcactctatgacaatgactgcatagccaccatcatggccaaaccacacccatcctgcaacacccagcctcttcccaggccctcccgttagcacttggtgctacccattctccgttcatggcttccccattgcctgggtctttgctccaaggtctttgcttttctcaccaagggctttgcttttcttaggtgcatccacattttaaaagcaggattcttatccaaaggaataaaagggaactatccagaaatgtattgaattatagaagtaatgagttggtataaaaacaaaagttcaaatgttgtaagagctcttgtataaaaataaaatgccctcctccctttgcccctcccagtctcactccttaggcagctattaatacttttgaccattcttttttttttgacctgcccctggagctgggcagaatttcatgagactcagctttttggttctggggcacctgctatggccattgtcaactcttactgagaagtcagttataaagaacacagtaaaggaacaatggtgttcctttgcaggtgtcaggagacttgtctgaggtttggctgccaactcactagatctccaaacaatcactgagcctccctttatacatatccctcatacaatatcataattgtataatataaatacaagtaataactctaaataatatgatatgccctatttcttgatttctctctttaaatagtatctatccactttttaccatgaaactgaagagtttggttcatcttctcccttttccctccctcgtcaaatttttgtttattatatttttatctcttggtccttctatgagtcaactataaaaataaataaagaccaatcacatgagaaaagcaaaggctatttattctgagcttgctgtagcaagggagtcagccacccaccgtcacttacattttggcagagactcaaaggcaggcagaggagtaggaaagctttagattagagaacaaggaaggcttcagctatggtcggattgaaggctgctggcatgcggaagctataggtggactaagtagaagtagggtatcctatgtgattagttaggggtgcgtatttggcttcctctggttggtcctaagttggaagcagggataaaaatttaggaagctgtcagttattaaacaagtcctggccatttggggctgacttaggctggctggattgtttatggtagaaaagggcattggtttcctgggcaggttgctgccgatcgtgggtcaaagttcatctacatatatatggcctggccattgcctgcttggctattcagtctctcacgacttcataactttaaacaatagagttaaacttctatttcgtgatcttccaaatgtaaacagtgtttctttctccccattctgtaagatacccacccccaccaccagctaatctccctccctctacctcccagcttcttccagctataccattatttttatatatgaaaagttgtaatcatactatccctttggcatgtgtaaatattccatgatgtgtctataggtcaattttgaaaatcaagagccagtaagcagcatttacaatatcataattgtatactataaatataagtaataacaattttttaaattttattttattttaagttctgggacacatgtgcaggatgtgtgggtttgttacgtaggtaaatgtttcacggtggcttgctgcacctgccaacccatcacctaggcattaagccccgcatgtgttagtaataagataattaaatgatataagtatgatttactagttgaaaaaagtaatgagatttcatccataattgaacttagtgaaagaaattttatatctgtaagcctgtaccactggaagcataatattttaaacatcaatgtaaagttggttctcctttattatacatttttttttctcaaaggcctacatgtcagataaactttcttggtcttgaatatctgaaaatgtcagcgtttctatttcacatctgattgatagtctggctggatacttaattctaagttccaggtgtaggactttgaagacattgcttggttgacatctactatccaacattgtggatcaagtcatctgatatcaatctcattttcatttttttataagtaattcatgtttttctttctagaagctctcaggattgtctttttatcctgttgttctagaatttcaagtggatgtatcctatgggctaaatatttgtgtccacccacctcaccccaagttcatatgtggaaaccctaatgcccaatgggacacaatttggacatagtatttgggaggtaattaggtctttcaggttaagtcctccttaggggattaaggcccttattagaaaagacatcggagagcttgctcccctgctctctgccgtctgccatgtgaggaatcagcgagaaggcagctgtctatgaactagaaggaagaccttcaccaggagctgaccatgctggcaccctaagctcagacttcatgaactgtgagaaatacatgtttgttttttaagccacccagtctttggtattcaattatagcatcccaaattggcaaagacaaggtgtctagaaaattattttggataaagccctgaaatcctcccaccagttattccacctgtgactgaggttggctctctcaccagcattgctataatctcttcccctcagacaaggaatcttcaggtattaattggcaagcttgtcttccaaccccacgcttcgactatgccaatcctattttaagtaactctttgagagacagcttgttatatcagaaggagaaccccatgtgatctcgagggaaggttattcaacctcccaaaacctcaattttattatccattggatcagcggtccccaacctttttggcaccagggagtggttttgcggaagacgatttttccaccgatgggatggcgagggaatgatggttcatggatgaaactgttccaactcagatcatcaggcattagttagattctcatgaggagcacataacctagattcctcacatgtgcagttcacaatagagttcgagctcctgagactctaatgctgctgctgatctctcaggaggcagagctcaggcagtaatgctcactcaccccactgctcacctcctgctatgcagacaggttcgtaacggaccacgggccagtactggtccatggctcaggggctgggactcctgtgttagatggacataacagtactacctcttaagatgtttgtgaagcataaattagagtaaaatgtgaatacaactcacctgccacaaatgataggagttattaggagctaacgaagtgagacaacatatatatatataatgattgtaactgtggcgtgtgtgtgtgtgtgtgtaataaatgtttgtaaactaccatcatataatcattccccaaaacaatgtacttataagaagaaaacctggccttgtccctacataaatggaagaaaacaaatacagcatttttaaagtgtagaagaagcttattagagtggttttcaaaaacataaatgaggccaggcatggtggctcatgcttgaaatcccagcattttgggaggccaagttgggaggattgcttgagcccaggaggtcaaggcggcagtgagccatgatagcaccaccgcactccagcctgggtaatgaagcaagactgtctcaaacacacacacaaacacacacacagacacatgaagattgtggagctccaaagtagatataaatggacaacagaaccacatacaggctaagccacagaaactactatctgggccaagtgtgagcaggtagtgtctgggagggtgtgtggaccctctctgggaaaaaacaagtgcaagaagatgagggaatggggcgttgagaaagaaagtgacctgggagagcaataacaacttctaagctgacaacagctaagatagggaacatagcatgtttgtgtatgcacgtgtgtgtgtgtttatcagtatgtcataggccatgtcaaggaaggagagaaagaaaatagcaataaaagtagaatgcagtaaaataaatgatggcagataaaatatgaaatagatttggtgtttttgaaacatcatcaacaaaaaaaaatgactagtagcctctaaacattttgtgtaaaggaacattttcaggccaggcacagtggtccaagcctgtaatctcaacactttgagaggctgaggtgggcagatcacctcaggtcaggagttcgagaccaacctggccaacatggtgaaaccccatctctactaaaaatacaaaattagccaggcatggtggcacatgcctgtaatcctagctgcttgggaggctgaggcaggagaatcgcttgaatctgggaggtggagtttacaatgaaccaagatcgcaccactgcactccagcctgggcaacagagtgagactgtcaaaaaaaaaaaagaaaaaaggaacattttcagcatatacagaattatagagaacagttcaccacatatattcaccgctcagcttcaaaaactatcaactcatgtcctgtgtcagccatcatccaatatttggtcttttgtgactggtttcttttacttaatttaatgttattgaggttcatccatatcgtagcctgtatctgcattttattccattttaattggtgaatagtattccattgtatggagctaccaaattctgtttatccattcatcacttgatagatctttgggctgtgcctggtgtttggctattatgaataatgctgctatgcacattcatgtctaagtctttcctgtggacatatgttttcatttctcttgggtggattttttgggtggattcttgggtagatttgttgagtatgtttgtgtttaacatttcaacaagctgtcatgctgttttccaaagtgactgtactcttcaatattcctgccagccatctatgagggttgtagtttctctctgcgcactttgcattctctcttttattgtagccatcctagagcgtgcaaagtggtatctcaatgtggttttaactttcatgtttctaataaccaatgatgttgagcatatcttaatgtgctgattagccattcctaggctgtccttggtgaaatgttcactcaaggatttgggccatttttaattgagttgattgtcttcttattgagttatggaagttctttttagactcttgatacaagtcctttatcagatatatgatgtgcaaatattttctcccagccagtggtccattttcttcatattttttgaagtcaaagtttttaaattaattcaacttcaatttatcaatttttttatggctcatgcttttaatgctgaatccaaggatcctttgcctaaagcaaggtcacaaagatttcctatgcttttttctagaattttttacttttagcttttacgttttgggctattatcctttgtgtatgatggaggtacttttttgtcgttgttgttggcatatggatatataattgtgccatttgctgaaaagaaatcccatggaaatgttttgacacctttgtcaaaaatcaatcaaccataaatgccatgaatgcaaggatttatttccagactctaatctgtttcattgacctatttgtctgtctttacataaataccacactgtcttaattaacagggctttgtagtaacttttgaaatggggcagtatggctgggcacggtgggtcaagcctgtaatcccagcactttgggaggccgaggcgggcagatcatgaggtcaggagttcgagatcagcctggccaatatggtgaaaccctgtctctactaaaaatacaaaaattagccaggcgtggtggcagaaacctgtaatctcagctactcgggaggctgaggcaggagaattgtttgaacccgggaggcagaggttgcaatgagccgagatcgcgccattgcactccagcctgggcgacagagcaagattctgactcaaaaaaaaagaaaaaagaaatggagtactagaagtcctctaatatttttttttccaaaattgttttgtgataaagtgatcatttataccagaatttcaacttgcttttaaaacgtggatgccttctctgagacaagcactgtgtctatcatgattgtaattcagtctattacctcaggcagagacatgcatgttcacaaatagcacagccctggttcagccctaaatttcaattgcacacaagtcatacatacaagatgccatggcagacagggctaagaacaactcaatttgctggagttcatttcaggagacttcacgtaggagatggtggctgagaggggccttgaaaaatgggtcagcttcattaagatgagctgaagaaactgatccagggctgggaaggaaatgggtagaggtagcagggcttgaaagcagatcagagaggggtaattttggagaagtggctagagggagaacgcaaggctggaaaagtgaggtgtgcacctcaggctcagaaacctcaggcaatatttggagcagctgagggaagcaggggcccaagggggtaaaaaggcagccaggccattttcctgctctatgcaaaggatacagtcttgccaggtgcagtggctcatgcttataatcccagcactttggaagactgaggtgggaggattgcttgagcccaggagttcaagaccagcctgggcaacgtagtaagactccatctctaaaaaaaatacgaaaattcgccaggtatggtggcacacgcctgtagtcccagctactcgggaggctgaggcaggaggatctcttgagcccaggagttggaggctgcagcgagctatgatcgcctcactgtactccagcctgggtgacagggtgagacactgtcaaacaaaacaaaacaaaacaaaacccacagtctttccccgaatcctgttcaatcctctcaaagaacactctattctggtaggaaaggtacgaggagggagcgtgagccacccacacaaatcttctgctcctacaggaagaataaataaaaccctaccgatgtgagtcgccaataccatcttcagccataaatgacgaagcatttttattgttctttaccctgtatgcttgaaacctggcaggtctgaggattaacatgagccactgtcctgccggagcagaggatgatctttgcaccaccctggcaactcctattaaaggctcaaagcttatgcccttttcttgctccttttccaagttggctgggtgtttttaaaaacttgcctttgcctctagagccttcctatcagccactggtatgggccaaaatgaccaccataagtgtgatgtcccctttttgctaaattttcagactctaatctaaaatggaattgatttgtgtaatgtctgaacccttgagactatttctgcttggaatggaaattgactccattcatgtttcaggagtggcaggctcccagaaatccaacagtgtcttcatcatagattcctgccaacatggttctgcctaataaatatgaacccaggtactggagaccattgatccccatttcagccttctgagagtctcagaacatatgcacaagcaaagcacccacattctggtggctctgggtgcattgtgttgagaagggatttgagtgagatgtgtagggagaggaagcggggcaatgccagagaaatcctttctccatttttatcagatctgctaccttttgctcccttggagattctgagtagatatagttaagaatttttgagtgacaagagttattgatacacatggtcaattggccaacacacagccatgccaacctctttctctcatgagtgacatcctgtagcaaagctgaagaagtgagattcttccttacccagccttccttgcagctaaagacagctatgtgacccagttctagccaatgacatataagaggaagggtgacagaatcttttgcaaaaatgttttctttacaaatgaaagaaaagaggcatttgaggacaagttattttattgttagtttgtgcccctctcccactacttcctgtctcggaattctgttgcaatgtctgaagctgtagtagccattctgtaatcatgaggcctcaagcacaaagatgaaaaaccagcacacagaagatggtggagaaggaaagatagaaagagccccgctctttgatgccatccctgacctgctagtccagcgctagtctggattcctccagacttcttgtttggtcaaataacaagatgccatcattgtttaagccatggttaacagagttttctatggctggcagccaaatatattcaagatagtgtagattctactactttctctcccctaacctctggaagttgcctttacttacactaaaatgtacagaactctcctggttcctgcccagaaaatcaatttattaaaaagagtagctggacttccagtaaaatgctgtagcaatagatgactattagatggaggatgatatagtgatggtagtgggaagggcaggtgcatggctcagggcctctgtgtgataagcagcccttgccttgccctgactgtttcatgagagatacaggaagaccagtgttttcttttttcttttttttttttttttggtccctctctggttaatgagtgggtttaatagtgactacccggaaatatataccccatgcagagctgaagatcaatattactagagggaagggaagaggagtgaggaaggaagggaggagacaaggaaaggaggaaggacaggaggagggagggaggaaggtgataggttcaatacaaacttgaagatatgggggatagcaggggatagaagagttctggagcaacaaacaataccaggattaaaatcagaagctgaggagcaaaatttggctgatgtggtagttgaaagcagccacatgaaggggcaggagggctgtctgaagtgaaatttgtcccgcggggtttgaggatgagaataaaacaatgtctttttttctttttttgaaacagagtcttgctctgtcacccaggctggagggcagtgacataatcacagctcattgcaacctctgcctcccaggctcaagggattctcatgcctcagcctcccgagtagctgggactacaggcacccacaaccatgcccagctaattttggtatttttagtagagatggggttttgccatgttagccaggctggtctcaaactcctgatctcaggtgatccgcccgcctcggtctcccaaagtcctgtgattacaggcacgagccaccatgcccggccactttattttgatatggacagttgactgatgtctcacatcatgtaagatgatctatatattcagcgtccaaccttcaggcacagctggttttcttggagcaacctgtattccaacctgtatgccagagcttccataacaaaactccacagactgggtggcttaaacaacagaaataaactttctcactgctctggaggctgcaagttcaagagtaaggtatcagccagtttggtttcttctgaggtcactctccttggcttgcagatgaccactttcttgctgtgtcctcacatgctctttcctctgtgcacacacatgtctgtgtcctaatttttgcttcttacaaggtcaccagttgtgttggatgagttgaggtcaccatgtgacctcattttaccttaatgacctctggaaaggccctatctacaaatctagtcacattctgaggtagtgggggtcaggacttaaacatgtgaactggggcaggacacagttcaacccgtaacacccctgtaacaaatcgccacagtgtcttaaagcaacacaaattattctcttacagtcctggagaactgtattagtctgttttcatgctgctgataaagacatacccaagactgggcaatttacgaaagaaagaggtttattggacttacagttccatattgctggggaggccttacaatcacggtggaaggcaagaaggagcaagtcacatcttacgtggatggtggcagggaaagaaagagagcttatgcagggaaactcccatttttaaaaccatcagatcttgtgagacttactcactatcaggagaacagcacaggaaagacccaccctcatgattcatttatctctcactgcatccttcccacaattatggaattatgggagctacaagatgagatttgggtggggacacagagctgaaccatatcaaggacagaagtccaaaattggtttcaccaagccaaaatcaaggtgtcagcagggctgcattgcttctgcaggctctcagggagatctgcttcctggatttttccagctttgagaagtctcctgcattatttggcctgggatccttcctccatttcttaagccagcagtggttggtcaagtttttctcactccgtgttactctaacactccaattctgtagtcaaatctccctctgcctctctcatttaaggacacttgtaaatacatttaaggcccacccacagaacccaacgtaatctgcccacctcaaaatccataatttaatcccatcagcaaagtcattttgccgtaaaataatatattcacaaattctggggattcagaaatgaatacttttggaggccattattcagcctatcatgtgtcataaatccacatctgtactgtgcacactgtgcacactgtagctgtacccctgagctggtcgggtgacaccagagttggtgtcactggtgctttcccaatcacaaagagaagaatctgatgagtgtgtgtcatgttctgggggagtggggctgagactagttaataaactcgattcctctagttctgtaatccccatatgccttgcaaattaagtggtttaaggaactcctttaggtccctagagcccaccaaatggaactctcctgaggaccccagtttaaaaagtaatgaggaaaaacagtgaggacaggggggtttgcttgtccctaaagaatcagtcacacagctcagcagtcgagcagtcacaatggaacaccaagaatgtagcactttgctgagtcagcatctgcaaatctgagctgagctgcttctccagcaaagaccagttcccagggtccaccatccacacacttgtttcaggccctcattcctaggtgtgccccggaccaagggcaagccacatggaatgatcctatatgcatttttatgttgatgaaattgggtgaaaatgagagaagactgggagatgctgaaggtagaggaataggcccgtttgcttttctttgatgatagagaacttttgaaaccaaatgtatatatatcacccccatgtattttttttaaagtctcacctaagagatacctatgatcttttcctattttaaaatattttaagcattaagaaaattttagagaattgattattaaacacaagtacattcagtccagctgtcagactttaacattttgccatatataattcatatctctcttttttaataaataaaatacaacagaagatttttagagtagttacactattctatatgatcctatactaatggatacatgtcatgatgcatttgccaaaacccattgaatgtatgacactaagactgaatgctaatgtaaattatggactttggatgataatgatgagtcaatgtagattcatcagttacaacaaatgtactactctggggcaggatgtagatagtagagaaggctgtgagtacatgggggcagggaatatatgggaaatctctgtaccttctactcaattgttctgtgaacctaaaaatactcaaaaataaactttatttaaaatatatatatagactggtcatggtgggtcacacctataattcgagcactttgggaggccaaggcaggtggatcacttgagctcaggaggtggaggctgcagtaagctaagatcacgccacggcactccagcctgggcaacagagtgagaccctctttcaaaaaaaataagataaaataaaattatatatatttttttatatagtgcacacaaacacatataagacagttgaagtaccttatgtacctttctgtaatatcatattcccccagaagtatttgaatttgaggtttattatcccatttttgtctttataattttaccttatgtataaatatctgtaaagaattaactgtatatatagttttgcatattgttaactttgtttcaatggtacactgtgtgtattcctctaaaactcacttttattgttcagaatttgaaatgtattcatgttgatttattcatttatctttaacagtgatacagcaaacagtgatacagtacttcagcttatttatccacttacctattgagagaaatctagcttgtttctagcttttgtgctatcgccaaccatgctgcaaagaacaatgttgtacgtttctgcttatgctcttaggtgctagcttctctgacatagactcttaggagtggaaatgctgggttgtagaaaatgcacatcttcatcattaaagatgtgaccaaattcctttccaaagtgattgtaccaatttacagtcccactaccagtacatgataatcaccattgctccaccaattcaccagcacttgctgttggcactcattttaatatttaccaatctgttcaaaatagaatggcagttggttttaacaaccattacattgggtattagtgagagtgagcatcattgcatgtatgcattggtcattcatgtttcttctgtaaatttcctgttcttgtcctttgaccatttttccccattgggttgttttcctttttctcattgatttgtgagagttctttatataatttggacattaatcctgtattaattacattcattttaaatattggattctattttaaggcttgtctcttaattttattggtcctttgttgcacagaagctttatctttttatgcattgaattttatcagcattttaaatgtttatttatttatttatttttaataatagaggtgggggtcttactctattgcccaggctgatcttgaacgtctggcctcaagtgatcatcttgcctcagcctcccaaagggctgggattacaagcatgagccaccttgcccagccatgtttatattttttaaggattatttaagaaagccctcttggctagcatatctcaatgatgtccttttaattttgaaatgatttttacttttttcatttagatgttaatctccttggattgattttagtgtagggttagggacctaattgtgttattttccttaaggaaaaccaactgtctcagcatcatttattaatttaaaaaaaatatttctccagtactctttattaattttttgaaatctcccaattactttaatgcactgtctctgccatttgtcaagtggtcagagggagcctatttccatgctgattctgttccattggtctatttgcctgtccctgccatcacgtcttctatttattactgtggctttttaatgtcttagctgatagagcaaatctctctaccttgttcttctacatttgtctttctttttttgacccttgcttttccaaataaattttggagttggtttgttaagttccagagacagaaagattctctgctcggattttaaaattaatttggggaaatttatcaataaattaggggaaatgtgatacctgtacaatactgagtctttgccatactatcttactctttaattttaaattttctttttattaacatgagtccataatccttatctgaaactcttagggtaagcatgtttcagaattcagaaattttcagatttaaaaaaggcaaaaggcaatattatctctgtataatatgttacatattatctcccagtgtcaatgctatttacgattttcctcttattttggttgagcacattctcaggtatagtgctgtgcaatagaagttctgcagtgatagaaatgttctatatctgcgcaatcaaatcaatgctcgggctgggctcagtgctcgcacctgtaatcccaacactctgggaggccgaggtgggtgaatcatttgagcttagaagttcgagatcagcctgaccaaaatggtgaaactccatctctgctaaaaatacaaaaattagctgggcatggtggcatgcacctgtaatcccagctactcgggagactgaggcacgagaatctcttgaacccaggaggtggaggctgcagtgagccaagatctcaccactacactccagcctgggcaacagagcaaggctgtctcaaagcataaatataaaaataaaaataaaaattgatgctcactagccacatgtggctatggagcatttgaaatgtgggtaatgtaactaaggaataaaattttaaattgtgttgaactgtaataaatgtaaatttaaataagcatctgtggcaaatgcctaccatattagacggcacagcactagtagtttccagagaaagggttcatgggagggaatgttttgagtccttacactccaaaaatacatttattctaccctcacacttaattgatggtttggctgagaataaaattctaggttaaaaaataattttaccttaaaattgtgaaggtattgcttcatatctccctagcttccagtattgctttttgcttttttttttttttttttgacagggtctctatcactcccaggctggagtacaatggtgtgatcatagctggctgcagccaggaactcctgggctcaagtgatcctcctgcctcagccactggagtacctaggaccacaccacaggtgcatgccaccacactcagctaatttttctaatttttctgtagagatggggatcttgctatgttgcccaggctggtctcaaactcctgggctcaaatatatctctcaccttggcctcctagagtgctgggattacaagcatgagccactgtgccccacctagtattacttttgagaagtcaaaagaacatcttaattccctgtttgaggattgtgatctgcttttgccctctgaaagttttaaggttttatctttgtcccaagcatttttgggcttcctgatgccatgctttgttgtgggtttattctcattcagtgtccagggcatttggtgggccttttcaatctggaaattcatatccttcagttctgagaaatttccttgaattatctcattgattatttctttcctttgttattttctgttctctttctctagaacttctgttattcaaatggtggacattctgtaccagtcttctaattttcttatatttttctcctctttccatctatttgtttttactgtgcttcctgggaaatttttcaggtatattttcccagactttctattgagtcttaaatttgtgtcttcatatttttaatttctaactggtattatttttgttccccaagagctctctttttataacattttttcttgtttcatggttgcaatattttcttacctctctaagaatattggtagatttttaaatgttttcttctacctgtttcctctttttctgttcatctgcattggtttctacacaactagcttgaggctttccttgacagctggtaatccttggttgtcaactcatatacataagagttggggaaggaaatgttcttagaaagctctgagtatatgtctggggtttggcacccattaacctcactgtggaatgatctggctaaaccatttagttgggaaacctgatgtcatctgtatctttaggtgtttcctccttgcctgttgagattcttcacagccgatggttccaatctcctgccagggaggcattggcctggctgctatttttctgttattccagagaagaacgtggacagaaggcttcagcatccagtgtatatggcttactaagtcctccctcccctttccagttcgatacttctgtacttactccagaaactatcttcagtggaaaaaccttgaatcttctgccagtgtgaggggattgtaggggaagatctatggatctgatttttttttcttttctttttgagacaggctgtcaccttgttgcccaggctggagtgtagtgatgcaaacatggctcactgcagcctccacctcctaggctcaagcaatcctcccatctcaccctcttgagttcctaggaccacaggcatatgccatcatgcctggataattttttaaacttttttgtagagatggagtctcaccaagttgcccaggctggtctcaagctgctgggctcaagcgatcctgccacctcagcctctcaaagtgctgggattacaggtgtgagccaccatgcctggacactgatttttaaacagcctttcagataaacctccttactttagcaatctttttttattccatattctcaaaggtgcctgatgccaccaattttggggttattgggtcatttcttctgtgttacagatcaggtctcaattttctccactgccagctttgaattcagttttttgttttgttttgttttgttttgagacagtctttctctgttgcccaggctggagggcagtggcacgatcttggctcactgcaacctccacctcccaggttcaagagtgaattcagtttttttggctctgctaagccgctttataagcatttctccaattttcaaaatttggaaatttttatcttctattgttatctgttatcttctcttcaatgctcttcatccttatgggtttatgtcttcagaaaacagtctctttattgccatttttgtgaagttttgagaggaagaaaaagtcaatgcatttgtttcccattttgtaaatgccagatggcaaaccagtttcctttcttcctccgccctgcaaaattggctgattccaaagcacagcgtctttaaatgcacaaacattattatttttttttttttgagacggagtctcgctctgtcgcccaggctggagtgcagtggcgggatctcggctcactgcaagctccgcctcccgggttcacgccattctcctgcctcagcctcccaagtagctgggactacaggcgcccgccactacgcccggctaattttttgtatttttagtagagacggggtttcaccgttttagccgggatggtctcgatctcctgacctcgtgatccgcccgcctcggcctcccaaagtgctgggattacaggcgtgagccaccgcgcccggcccaaacattattattaaacagctacaatgggtcagtcctgtgcttgtcactaatcagggacaaatgaatagacattgaataaaaggttgctgccacatgaaagttctaaagcaagacatttaagctgactgtctggagtctcctggctcctgaggtccccctgactcttgtccactatcctatgtggccatgattagctctcctgggatagtagcctgttccaggttctgggctggtagggatcaaacacatttgatctaaatcttatgagcactctgctctgaccaagtgctccaatgaaaaagtatagacttttaattctagctcaccacaaatatttcccacaaacatcaaatgaaagaaaagggcagaagcaaagtatgttaaatataagtctattgagtcactctcattagtcaccctgttttgtttgtttttttcatttcaaaccctatcgaagtgaatggagtcgttcttaaccaaggtaagccatagggtcctaaggacccatcgtgtgtaattaatatgaaatgttgacgattcacttgttgaaatggcatattcaatgtgacataaaatataaatgaacctgaaactacatggattgctgcagactgtaggccactctgaatgggtgctttttgtctgaagtctatttttaatatattttactatatatcaagcaatatttaagcactttacaagtattgtactacctgattcaatctctgtaacattatgagagaagtacaaccagtatcctcattttacatatttaaaaaaccaggcccagaaaggttaagtaactgctcaaggtcacacaattagtaaaagaaagagctggctgggtgcagtggctcatgcctgtaatcccagcactttaggaggctgtgaggtgtgaggcttacttgaagccaggagcttgagaccaggctgggcaacgtagagagaccctgtctctacaaaataatttaaaaatcagctgggtgtggtcgcacatgtgtgtagtctcagctcctcaggagtctgaggtgggaggatcacttgagcccaggaattggaagctgcagtgagtcatgatcatgccaccacactccagccagatgatagagaccctgtgtctaaaaaataaaataaaataaaataaaagagctgagattcaaaccttagcagtctaactccaaagcctagaaatgtatggactcttatgtgcattactctaagctaatagttctcaactggggacaattttgtcacccagggaacctttggcaatgtctggagaaattttcggttgtcacaacttgggggaggggattctacttgcgtctagtgggtagataccagaaatgctgctaaacatcctataatgcccaggatagttccccacaacaaagtgtctggcccaaatgtcagtagtgccaaggatgggagagcatgctggtgtgctagtcactgatgctcttctcccagttttacaagttcttcctccaggcatatggtataatttgcatttcttaaagttggtgtaggcatatatcttgcttgggccaatgtaaagttgctgcacttctagacaaaaattttaaaagccagggcataacaccatgtatccttttttatactttggtcaccttggaagtcttagaaacacagagatgggacttccctctgccttcgtccttatgtgaggataaagcagaagagaaccttaagaatgacccatgacagaagcttcctgaactataaatactgtttgtactaatagttttaagccgttgagatttggaattgtttctgcagcataactcaggctaccccaactgatgaggactccatcctcacataagtacatatgtccctgtctcatgtaacctgactcaggtctttctactcatttcccaggttcctcacaaaggtgaatgatttcctgctgcaaagactgtgaggcatcatttttccaattagaagtgttgctttgtcattggactacatatatctggataccataatgataatggacttgcttcccttttaatttcatggtaagcctctgacagaagttgcatagtagttgttgtcataacaaccatgcaactcagattttccaaattaaagcacatacttgctagtctcactatacctcaactagctctagtgaggtcagaatgactaacatcatcaaacctaggattacacgaaccttaaatcccaggaggtgtgggcagccattagtcagagtattcaactttattcacaaattttcttgatgcttaagaaatctaagtgttctggctggttgcagtagctcacgcttgtaatcccagcactttgggaggccaaggcgggtggattgcctgaggtcaggagttcgagaccagcctggccaacatggtaaaaccctgtctctattaaaaatacaaaaaaattaaccaggtatggtggcacacacctgtaatcccagctactcgggaggctgaggcagaggaatggcttgaacccgggaggtggaggttgcagtgagccaagattgcaccactgcactccagcctgggtgacagagcaagactccatctcaaaaaaaaaaaaaaagaaagaaagacagacagaaagaaaggaaacctaagtgttctgagtttacgatttgtagaccttacctcatatatcaaattattctacctggtgatgaattggaatttcactggagtttcacccagtatgattgatgagatatgaatttatggcaagctgacaacataaattaataaataatccacataacagtttattgtttcaactaatgaaaaatctggatactcaatgtaaaacgtatctagattataaaattgatatcaaatggatatacaagatttgtggaatccagtagccatggagagatggtagaagaaaaagaccattgctactacttctccgtggaaaaaaaagcttctgccaggagtatctcattaaggtccttaaaatgccagtcttctcctccctccaacctctacataattttgtcatactgttcttctagtttgaaatgccatcttatctcctctcctctcacccaaatccagcaaatccctccttaatatcaagttcacgtttctcctcttctgtgaagccttctaagccaatactacaacctttcctttcttagcatttataatatggaccatgtattttagtactggactgtaagttctttaagggaagaggtctttgcatataaatctttaatttctacacagcaagataacttatattcattcattcaacagattgagcatttatatcctgagttagacccagtctgacaaaggcactgacatggaggagctcatggtctgatggggataacaggtatggagatgcataaatacattatggcaagtatataaaagagctaaggctgtcctgtggctgcctgaattttacttgtgttccatgcatggttctgttggatcaaggtgggaacagcatacaaagtatgggacacacagggaagcctgacacacataaccaaggggtcctgaagccaaaaagcgagagctgatcagtgtcaagaggataaaagccatcatcaaaagttacagaaagtcaaggaaatacaccaagaaaggcaggtcaaggtggaagcaggtctgggagcttacctatacctgttccagttactgtggctgcataacaaattactttcaaaatttagtgacttcaaacaataaatttaattttgcttatgagtctgaaattcagacatggcttagtggggatagcttgtctctgctctgctcaacgtcatatgagagggtttgaaggctgggaactggaattatctgaaggtccatttacaagcctagtggctgatgctgcagagactgaaacagctgggggctggaacagcttggactcctggaactgtctctttgtcgcaatgtggcctttccagtgtggtctctccagcatggcaccatcagggtagccaggtgttttggttccctaccgctgcacagcaaatcaccataaactgtggcttaaaccatgcacactcatgtcacaggtcccatgggtcaagcataagccatatctttttttttttttttgagacagagtctcgctctgtcgcccaggctggagtgcagtagcacgatctcggctcactgcaagctccacctcctgggttcaggccattctcctgactcagcctcccaagtagctgggactacaggcacccgccaccatgcccagctaatttttgtgtattttttagtagagacagggtttcaccgtgttagccaggatggtctcaatctcctgacctcgtgatccgcccgcctcggcctcccaaagtgctgggattacaggcatgagccactgtgcccggccagcttaagccatatcttttaactggatcttctgcttagggtctcacaaggctgccattaaggtattggctgggctgcattctcatttggagactcaaatgggggaaacctgctcctaagctttttcaggtgtttggcagaattcatttccttgtgttgtaagagtgaaagacccagctttggctggttgtcagcatgctcagcttctgcccagattcaagggaatgggctatagatctcacctttcatggaaggcgtatccatcatgttacaggaaaagcatatgggagtgggaatctactggtttagttacctctggaaaagacaatcagtcaccgtttgccgtttggccacaacaattcacatcactcccacatgcaaaatacatttatttcctctccctccatctttgatttgtctaccaagatatggttcaagggagtgctgctataagttaagagtcaagtggaaaacttttactactacaatctgggagaaaatatttcaaaaagaggatttttcacctgagttgaattcagttagtgctatataggaaggagtttgttaaatgagtgatattcactttaataccattgtttgtaaggtctggtattgctctctgctttatttgtgtctgttttatctccctgacaagactatacactttttgaaaatagagacactgtattttgtgtcttctgtactccttgagtagtgctagtcccaagggagagactcagctcattcctacaaaatacatgaattcctcaattccctgaggccccagtgtataaattactgccaatccttggaaaagtctaacttgaaaaggcctctatttaccaagtccatgaatcacaacagccctgtacatcaagaaatgcagtgtgatttttgaggtgtctgtatgtccagtgaaatttcttccttttggaatgtctccacaaggagtagaaggaaaaaagacaaacataacaaggaatttgactgtgctcacacaacatttggatagctgaggggaaggtttagtcttgcaaaatgtcttcaagggcctccttcctcccatcccaccccatccccagtggagataatttgtagtttgaggcgttgagctggtgaggtgacttaaagaacaattccatttcttcattgtatagaaacatcttaaaagagatgttcagagtcttagatattgttaaagaagatttcaaataaaagctaaccaaccctgagcagagctttgatgaaaaaattttcccagctgccttagtggcttatgcctgtaatcccagcactttaggaggctgagacaggaggattgcttgaacccaggagtttgatataagcctgggcaacatggcaaaaccccatttttgtaccaaaaatacaaaaattaacaaggtgtggtagtgtgcatctatagtcccagctactcaggaggctgaggtgggaggatcacttgagcccaggaggtcaaggctgcagtgagccaaggtagcaccgctgcactccatccagcctgggtgacggagcaagatcttgtctcaaaaaaaagtttttttcctcaatgcatcctaccttctcacttgtgttatttttttaaaactcacctctccccagagtcacctcttcccagactattacaaaatacccttctggctggacacagtggctcacacctgtaatcccagaatttcggaatttcgaggtgggaggattgcttgaggccaggagcctggccaacatagtgagatcctgtctctacaaagaaaaaaaaatgaagttagccaggcttggtggtgcacacctgtggtcctagctactcctgaggctgagacaagaggattgcttcatcccaggagttaaaggctgcagtgagctatgattgcaccactgcacgccagctggggcaacagagtaagattccatctctaaaacaaaaaccaaaacaatcaaaacactctcctgtatttaaccataagttctcttctttctttctcttaaatacgtacaatctacttgaattttattcaggtgaaagtgggaatgactgcaaattgcccaaagctagattctcaaactcaaaagtgtctaagaatcatctaggcagcttggtaaaaatcacaggtccctggccctaccccaaacccctgaaggagaatgtgtgcatgaaggagctgaggaatatgtgtttgttgttgttgttgttgtttttgagatggagtctcgctctgtcgcccaggctggagtgcagtggcacgatatcggctcactgcaacctccgcctccttggttcaagtgattctcctgcctcagccccccaagtagcttggattacaggtgcgtgccaccacattcagataatttttgtatttttagtagaaacagggtttcaccatgttggccaggctggtttcaaactcctgacctcaaatgatctgcctgccttggcctcccaaagtgcagggattacaggcgtgagccacagcacccaacgaggaaaatgtgtttttaatgaacactgatctagaggtggtcttgttctctgtgttttctcagggtcaccactaagtctgaggggagcagcttccaatgctcgcatagctaattttcttttccctcctccacaccccaagtttgcctatgagaagaacagaaaacaaagggtagaactaattgacaaagatccttcctgctctaacatctatgattcttttaattatatctgcccacaattcccagatgttcatagtctccccaaaagaagggatttttctcttgaaaccaagctagacagctacaaatatgttctaaatttcacaggccctgttccctatggaaacacttatgattaaacccaattcccaattcaaattaaaatttagcattagagattgaaatgaaaactaaagaggatgatctcaaagttgctaatttttcttccctcccagggtccttaacaccattgcagttttgctaataacataaggatgtagtagcatcctttgctaataacatcatcttgcatcctggataatcttggccctataagcatccgggggataaaaacacttttcactgcccctgtggtcaatagcttctgtgctgtccactatagacccatgattatagctcctggacaatctcattgacagcactgacctcaatggatctgactgtttcctattagtcctgtggtacaacagctcattcattcattcattgtgccaactattcaaaggatgatgagggaaggctggaatagcagatatgtctctgttcttcaggagttcacgagttctctatccataaggatagggggcatggttggggacccactcctttcatcatgggtaaagattggggacaaacgagaaaagaaaaccaggttcaagaaattcattaactgtttccatttattatatggatcattactactaaaatagacttagagcatcaatcctatcattttgcagatgatgaaactgagactcagagagatggagtaatttgcccaatattacacagcacgtatctgcagcctcctaattcaggactccttctgctatagcaacaggctaagagaagccaataattggcttatatttgccagctgttttcatcaaaatcttcctggttacccaaagggaaaaatggctttctacattttgtggtaggtcattctagaaaagaaagatgctaatcatcaccaaccataaaacaagaaagtaataagccttccagattatctcttccaaccattctcctatagatctggaccatgaggcctagagggctggagcttcagctctcaaggctatgtgggagaggcagagagattggaatccagaatcccaatccctggcaaatgaccactaccacactgctgcatctctgaaaaatatatcttggtgttgacccaaaatatatttaaaagctttgtcacatttttttaaatgtctatatgtgtacgccaatgattgcacaatcaatgctgtgctttgatctgtcacactttggtccttagtgctggtacatatctcaatggtgacaggagtgacattcaaggaaaaatgactcaaagatgctttaaagtttcctaagaagatgctctatatatgaatccctttagcattatttcagaactcaagaacctttagcagatttcatatttaatataatgtcaccactagttcaaaatctatatataataagatagaaaagggcaccactggtgctgaaaatgtcacgttgaagagaacaacgaagaacacacaatcatctacagccttctcactcagcgctgtcaggaaccaacagcactggcaccaccaggagcttgttggaaatgcaaaatcttgggttcaccccagacctgctgaatcaaatctttattttcacaagatccctggggacttgcatgcaggtaagatttgagaagcacaggtctaaggtatttctctatcaatgaacagagcaatgggtagagcagaggagaggcccagaaactcagagttctggtgttccttgcatggccgttgaaaactgtccctaacctctctgggtagcagcttcctcaagtataaactgaggctctggttgaaaaggctgttgtcataagctgctgacacagagcttttttcagtcccaattgtgtaggacagcttgtgtgatgagaattgaatgacatgcatatcacacatttggtatgctcaatgaatgctattaataaaattgtgaatcacaaatgttactcccatttccttcccagctcagggaagaaacggtatgcatgacatgatgcattgaatggggcagcctacatctactttgcctcctgagaatatcctgagcatcaggccagtgttggcttcgccaggaatcctaactcaggtcttgaaagcaagattgttgctgttaaaaaggtgacatgggatttttctgtttcctcattacattgctttagtttctccctgcctgaagcttctttaatctgtaggctgtgggcaccacctttaaagttttgactcacattatctatcccaaagtaaataatgactaaagtggtggcaaagtcaacacattctttgaaagacaatgaatctgggtgttgaatgaaatcagatgccaggaatatatacattgttgttacaacgctattacacaacaggccttagaagaattccttttctccaggtaaaaactacccccgtaccagttactctgggtgaagaaaggcgtctatgtttggcaaggactaaggaatatttgacttcatgaatcaataactattctcaaagctgctattgacctctgatctgcaaatctgtcagcaaagagagattatggtaactatactgctagtaaaatgcaaacctgttggttaaacatttgctgaaagccctgctagtgacccctgttaaagtgaaccaaatttggccacgtgttcttgcaatgttctggaacatcagagaaaaataactgcctgacccaacacagcttagctcctagagagctaagagatttctctgggccagaagcgttggcagggatcattcctttctcagtctctctcttctaccactgggcccgagttagtgggatctgttaggaggtttttgaataataatgactgttctcaatccttctgaagattctcaaaattaatttcttctcaagagtgcttctaccccacacaaagaaaaggtgcaagaatgttttttcttattccttcatctccctcaatgcctatcatagtgtttggcacacaataggtcttaaatactttaaaaatgaacaaagtgttctttccactgtgctccacctatacattgtacaaccatctacttgaacacttaccatgctgaatttcgtggtttatttatatggctatttcacttttttatttttattttttgaaatagattcttgctctgtcacccacactggagtgcagtggcacgattatagatcactgtaattgcaaactcctgggcttaagtgatcctcccacctcagcctcccaaagtgttgggattacaggtatgagccaccatgtccagccagctattaacctttctgtgttatgtctttcaaaagaaagattctttgtcctattcatcattgtttctccatcacttgttacagaacccaagggttatgggcttggttcatcctttctgaggaagtggggtagcagatgatagcaagataaccctcgtttgtaaataccttagtgatggacttaacaatctcttctttaaaaatataagtgcaataagaccttgactaaaagagtaaggttcagaatttcctcataaaaggttcagctacacgttaaaaggagaattggattccaaagtttaaagtgattctatgaaagcctttattaatattttctgtgttcactgaaggaaaatgagcagctgagagcatactaaataagaagataccaatgatgcattacacatctttaattagtactaatgcgtgctatgtaattaatccaatttagcatcccttctccactagaaacatctctcttccctgcagtctccacagaatggtataaatgtgtcctgatttactgcaaataaggtgctttcacttcctcacagtggttccctgtcatgcaaatgctctccactttctgttcttgtgagctggggctggtcccctgggtaacctacagaagacccagacgatttggggtaactttggtttcctctagttggcctagctcagaagacatttctcaagttccttttccaagattacgcagattcgactccatccctgctaacttaaaagtccaactacagaggccacccgttccccactcgtatctcagctcctacctcgtaacagacaccagagtacgctccaacttctggcctcattttccttcaatataattagccgcacataaatgcccttctttattttctaccactagttcccattctgagagttgtaaatcatctcagctcgaattgcccctctttcgtaatatttcaagttgggctattaaccaaccaccatcccttattctctaaaacccaggcaatataacatgacagttgatgatatagcgaattgctcgtttgaccagggacttgagataatacagtatacaaagttgagcagtgactatctttttgatatagtagcttaaaaaatcacttccatgcttcagaatgcaaagcaatgtgcatattgcattacatactctgctaagtcaaaaaagaagatgagattcccttttccaccccaaaatgtattcaggaaggataagaaaagaacaaaaatgactatagaagaagacaatagcagagtctagatcaaggactaaaactggctataatcaatctcacaagaaacaaaaacgaatgtatgttcattgtttcttaggagcatgaccttttggagaaaagtctggaaatctgacctttggcagaaaagatgaaaaactgatctaacaccatttttctttgagaaaagctcttctctacactatatctgaagagcaaaacttgaactcatctatgtcagggccagggctgtgactagccatataatatttctgtgggaattttttttttttaattgctttctttcctccagccagatgcaacccctcaccaggcacgtggcctgctaaattgaatacaagccacattttagcccctttatcccctcagccaaaaacctttgagcagtgactaaactgcaccatctttcataacaaccctcattaacaccctactcaaattctttcaatggtttgttactgctctcaaggtaaaattcaggtttcatattgcagccccaatctcactctcctctcttctggaactgtgatagacaaatgtgagactttttaattctgtcttttgtatcttgttatgccccttttatatttttcatctcatgtgctgcattctgcataatttctccagccctgtcttccagttcattaattctctcattaaccatgcctaatgcttaatatacccactaagttttaaatttcaatcacttaattttttgtctctgtaaattcaaattttaaaatctgctgtatcatttttattattttctataccctgaaaatattttccagcttgtctatttgtttgtttatctgtttctgaagtagtaggcttagtattgtaagaaatcctttttttcttttttcctttgagacaggatcttgctctgtcgctcaggctggagtgcagtggcatgaacacaactcactgcagcctcaacctccctggactcaagtgatcctcccacctcagcctcctgagtagctgggactacaggggagcagctaattttttagtgttttatagagagagggtttcaccaatgttgcccaggctggtatcaaacttctgggctcaagcaatccactcgccttggacttccaaagtgctggaattacaggtatgagtcaccatggctggccttaggtaatttcaatatctaaaattttgtgggtctgttctgctgtgggttgtttgtttttctttttagtgtttattcattcattaatttattactgtgagctatgcattttccttagaaaattatttgagggaattgcttgaggcctcagatgaaggtggggttctctgatatttacatttgcttctgtcaggttcctgaaactattaccagtctggaacaattctaaaatgagtttatagcttgaggttttctggactgcctgggtgatgtgaatttgggctgcaaacccatgagaagacttgttttccattatagtgtccttgggccagaggattgattcctcctgatgtgctcaggtccaagaagactttcctggaaggcaaggctatttctggttcatcattaaacatgaaaggtatagtcctttagggcctcaaggttgtgtgtggaagatcttacattagattatttgcttgagcaagccctgggctttgttttttgtgctccttcatccaagggaccttgacaactgaagtccaatttcagaaagcactctccatgttctatatattttggagggtttctccctttatgtagatttttttttattttcataattgagattttattggttgaggatcagtacagacatttcaatttgtacacaattcttaacatatgtaatgaaattctaaaaagccatgtattgtaattaattcttttttaaagttattccagtgactttccagcttaaaatttggaagcaaattttccttaagaggctatcaagtactggtatcttcacacgttggtcagctgttacatacagcccacctgaatagcacatacggccacaactgaatagcacgtacactgcatattcatatttgtaatctttcacagcacagtaacaatgttattaggaaaacaggactaccaaaaccaaagatgttacagagtgcacacaattctgacagggagagccatgatcagagtggttttctttaggaaacaattctactaaaaaacaacatgggaatagaagtaatttaaaatgttcaagacattaaacacaggactgactccatattgccatttaatatgctttgtattataggatataaaaactaaccccccatctatggaatattaagctgacacccgagatagtcagagcctcccgtaattcaatatcccacactattttctggttgtaccaaaaaagaaacagccagcaaatgatttcacctcttaaaaaaaagcatttacatttaaaaaaaagggatgaggtgggattccttccttcttaaaaatgtttcagccgggcgcggtggctcacgcctgtaatcccagcactctgggaggccgaggcaggcggatcacctgaggtccggagttcgagaccagcctgaccaacatggagaaatcccgtctctactaaaaatacaaaattagctgggcatggtggtgcatgcctgtaatcccagctactctggaggctgaggccggagaatggcttgaacccgggaggcggaggttgctgtgagccgagatcacgccattgcactccagcctgggcaacaagagcgaaactccgtctcaaaaaaaaaaaaaaaaaatgtttctagagctactaaaaaatttgcatttacagaatagctgataaaaatattcctctggattgtacaagaagggagacagggaccactgataagacatggtatatggtattaatcagacttggcttctttctctcctgcttcatcagaggctggactctcctcagttttcgtttccccattttctgcaggtaaatcttctttagtttcttggttagccacttcagtctgttttccctttgctccccttttcccttttgtttgcacttttttgtctgaagatttatccttcgctgctgcctttttcggctttgcttccacttttgcaggaggtttagctgacaaccgtgctgatctcctcttgggctcttccttggcgccccccaccccacctttatgtagatttttaaactaactcaataatgctagctgggcctggcacagtggctcatggctgtaatcccagcagtttgggaggccgaggtgggcggatcacctgaagtcgggagtttgagaccaacctggccaacatggtgaaaccccatctctactaaaaatacaaaaattagccaggtgtggtggtggatgcctgtaatcccagctactcgggaggctgaggcaggagaaacgcttgaacccaggaggcagtgattgcagtgagccaagatcatgccgctatactccagcctgggcgacagagtgattctccttctcaaaaagaaagaaagaaaaagaaaagaaaataataaaataagtgctagctgcaattatttctactatctttttttggttactcatgaaaacagtctacttttaaaaagcatgggctaaaaaaagagggggctagaaactatctggaacagtaaagtatgtcgatgttttagcttttcttttttctgaaaatatgtgtgatgtgtttagatgagaaccagaaaaaggcttttcactgtgtctgtactgttattcttttcattccatggggtgttactttagcacttaactagagaagatgtacacacagttatagaaagagctcggggctcctcatagcccatcagattccaccatttgatttacactgagtgaaatggattataaacatttataaaagtcaccagagcaaaggaataaagtgtcctgaggagcaccaggaaaagaatcaacattttagactagaaatatgctcaccaagtatctggggagtaaaatgcaaaccacagtatgtgcagtttggaaatattgtatttgttttacatatcagcctttacacaggtcttccaaacttgcagacctgggctttagttgatttccactcatgcaggccttactcatcatcatttcaaatgttgccatcactatatattaccatcttccactgtggcttatatatcatgctgcctggatcagggatgttgtagaagtgagtttgctcctccagtggatttcaggccaacttttcctatgtcatgtctaaagccaaaaaaaaagaaagaatgttataaaatgggtaacacttccctatactgatgctgcagtatggtggttatatacgtgaaagaaaaaaaactgcaacaaaacaaaacaaaacaaatgaaaacctgttttgttcctagtgggataatgcccctgtgctttgtcagccagccatggcataactgccaatgtgctgtcagtcacatctgcagggagaaagagcatgcctgtgtttatttgcatgacttggttattttttaagtctccccaggttattgtaacatgttggaaaggctgagaattgctaactctcattattgtggagtaaattttaatagcccttaggcttgacaaatcatgtttctagctgataataggagagatattattatccccaacttacagatgtcgaaggcaaggctcaaattatttaaaggcctattagggcttaagattaatcactgcttaagtaccaaatgaaataaatgcctttgaggagagcacacttccttaacttttccttcatcttaaataaaggaccctggaatcagatatgcctagaatagggaaggacttcagctgtaatgaggaaactgggaatcagagagccagagcttatcttgcccatctttatgttccctgcactgtctcatcccatgagctcaataaatatttgataaactaaatgaaatgaggtgaccaaggtcacacagcccccacacctagcttccagcctccaatggcgctatacctgctccatacctgctccccctacagaggttatctgtccctgtgtagctgtggagaccacacctcctaccttgtgtgggtgagtcaaggtttcaaatggtctgtctctttcttcccaaagtacacttgttttgcttttccagcatgtgcaatgatttttttattctaaaactatggtagctgtccacgacagaaatacccgtcactaagtcagggtctagagtccccaaacatcgccctctccttccattataacactttttaaatgtataagaaaagcaagctggctcatgcctgtaatcccagaactttgggaggctaaggtgagaggatcgcttgagcccaggagttcgaggccagcctgggcaacatagcaagacctcatctctacaaaaatatcaaaaaattagctgggcatgatggtgcatgcctgtagtcccagctactcaggaggctgggtgggagaatagcttgagcccaggagattgaggctgcagggagccaggattgcaccgctgctctccagcctgggcaacagagtgagaccctggctctaaaataaacaaataaatgaaaattaaaaaaaaaaaaagaaaagcaagttcataaatgctcttggttttgtgcaggaattgtttactcattcacacaggggcctgtctctgtaccagttacaaagagccatgaccgggaatatctctgaggttttctcttgcaccgtcaactttctggtttcttatgagttgtgcttctcctcaggtttcacatgttattctgtttctccagccctgtctgtggacaatgttatctctcattcacacttttgggcccttaggcactgtgcaacctcaaccactgcctcctcccataactgccactgcattcatccccaacccggtccacctagttcacctccgaaggtggtgggagtgaagctggcctggggttttcactgtggtagactgtgggggtctctgcaatttgggccacagggagagtgaggggtggggcagacggagaccaaagatgaggagagagatggaaattgtttcctgagctgtgaggagctgcctggactttgggaatgtaaggagagctagaatattctgttgctgttgtccttgagtgcagcgccctgggtcggggagccatggggagggaggtaataggtctggatgacatgccaccatcaactagagaagagccagcctatcaaggaacccaaaagaaagtggattagcaggctgtgctgacagaccagtcttgaagagagggaggtctctcaacactgagatggcattcacggacggtgcgtgtcccgtcactcaccctccaacgcaaactcccagaagacgaccactgccttggtgctgggcacatgagctcagaatgtatgggggtgtatgtggcatggagtgcagacactctgttgtatagactcggagacaaaaataatcacggtgtggactgcattaggagtagggagtcaggcttgcttgggttctaatcctggccatgtgacctcgagctagctcctaaatttctccaggcctcagcgtccttctctgtaaaatactgcctactgtaggccgggcgcggtggctcatgcctgtaattccagcactttgggagaccgaggcaggcggatcatgaggtcaggagtttgagaccagcctggccaacatagtggaaccccgtctctactaaaaatacaaaaaattagctaggcatggtggcgggcacctgtaatcccagctacttgggaggctgaggcaggagaatcacttgaagccgggaggcggaggttgcagtgagccgagatcgtgcctctgcactccagccccggggacagtgtgagacttcatctcaaaaaacaaaaacaaaaacaaaaacaaaaactgcctactgtagagggtgattgctgctgctatgattttatacaaaaatatattaaattccccaggtatagatttttgtatttggtactaagataaacaaaagagatttaccaaaaaaatcacattctgtgcatgtaacaaatactcacatgtaccccataaataagtaaaatattatatatcaattaaaaaaagacaaagtacgtgttcttccactgtgcattttgttatctggaaatccataatagaatatgaagatatttactattaactataacccttaaggatactttctgccaggtgtgttggctcatgcctgtaatcccagcactttgggaggccaaggtaagaggatcacttgagatcaggagttcaagagcagcctggtcaacatagtgagaccccatctccacaaaaaatttaaaaaattagccaggcacaatggtacatgcctgtagtctcagctactcaggaggctaaggtgggaggaccgcttgagtccaggaggtcaaggctgcagtgaggcataattgcacgactgcatgccagcctgggtgacagagcaaagccctatctcaaaaacaaaacaaaacaaaacaaaaaaaattttctgaattgtcaatataaagaatactgtattcagtataatttactaattgttatatttctactgaattctcatttttagaaaattaataattttaatatgttatctaatgtctttctgcttatctaagtgtttaattaaccagaaagtcaaattttggagctgtgctgaagcattcatagttgcacatgtgatattatgtcctaaataagtaaaaaattgagtgggagcaagaaatggtatcagaccagggattctggtcatctccctggaagacttactgtgtgctgtggctttgtgactgacgggttgtgtgtatgtatgtgtgtgttgcttaagctacaattcaggagatactaataaaatccattcaaaatgaacttacagctactaaattttagaagtaagagctaaaacccataaatctcaggcacaatggagactaataaaattttgtaatatattttattttactacttcaaaacaccctttactaacatgagctaattaatcctaaaatgactcctacatgaagtttactattatgatctctatttcctgctgggagaatggaagatagagtgattaaatgatatatttaattaggattcaggaattttttatattagtccacaattttaactaataatcagaaaattatttcggtttaaaaaaagttgttgaataacctttttgaccattatttatctcagaatggcctgatcataaaaagaattctagcgttttcttgtcttaataaaaaactgttgtcatggaaatatttcagatccctccatcctccaattggctgaatctgaacagtacataaacaagcagattaactgaggctcagtgaagtcttttacggtggaagtaacgtctggaaccagctgtattacaagcctttccaaagtccatctcccaggacagggaagagagaataaaagaactctgttggaggctcagctgtactctctaacaatggcttcttatcccaactgactaagttctctcactctatctaaatcaaatacactaaatcaattactgcttcttgtgcagaagtcttatctattttgattggcaaataaaaatgaagttgtttactaggaaagctgtggtatgacaatattttccaggcagtttgggcctggggtttgcatttaatttaatcaagtgaatttgtgaactgatagtgccattcatttcagtcaggttgggggacctgaccaatgcatgattttatattcacaacaaaaatattctccttccttccctcaatacaggaactctgcatcaaatcgctttccgtgaatttgtttccatgcagtggtgtggaagagcaattataaaattaattcagagcaggaatgttttatatcctgaatgaagaagaaaggggagattggaggtgctaccttaatgtgtgcctggatccatcattcctgaacatgctgctgttttatttcattctgatgtggtgtttctcccagctcctaagctccttttggcatatatctttttgcagaactggaaaaaatttgaaatgagaaaaaatgagttgtggctgttttttgttttgggttttgttttggtagaaatggggttttagcatatttcccaagctggtctggagctcctgagctcaagggagccgctggcctcagcctcccaaagtgctgggattacaggcatgagccgccacacccagcctaagaaatgggttttgttttgagatttccacaaccacactagaagtggctgacatcctgggagtgagtgtggaaacttcaagactggcttttgagaacctgagtctagggcgtgtatcgggtgcttcttatgttttcgtgctcacttgtgtgggaagacaagatatgagacaaaaagacacacatagctgcaggcacacacgtacatgtgtatacatattgctggtttagaaggccttgagcctttgggatactgaggccagaggatcacttgagcctgggagtttgaaaccagcttgcgcaacatagtgagatcctatctttacaaaaaatcttttaaaaattagctgggcaaagtggtgcacagctgtggtcccagctattcgtgaggctaaggtagggggatctcttgagcctgggagatggaggctgcagtgatctatggtcacgccactgcactacagcctaggcaagatcttgtttttttgtttgtttgtttttgtgtgttttttcttaaaaaaagaagaaagcagcctggagtaacataggaaaaggattatattaattcttcaagagagagacaaggacagtttgtctaaacttggagcacttataacgaatatgataaatcattcatataatttcctttataatgctggagttgaagaactagaacaaattgctcatcttatgaggccaggctggtggtgaatcaagccagtattctgccagcagcatgaagggggtatgtcatgggacgtcataattaccctcatgctaaaacctcaaaaggttaaagggccctgagtgaaatccccaacaccttgtggctcttaatgagtgtttactgtaatgataaatgataaaagctctctctaaatctgttgctcactgacttaactaaacttttcctgatttatttttatgctgaggcttttatctgggactaagtttcataagcttgcagtccatggtgtaaagtataaaatgacttattttaagcttcaaaggatgttctcaaatttgggcattccagaatttaatgaacagacagcctgtccctcatgtgtgtttatgattggataggcttgctttattttaacctgataaacccggagactcatcattttcaagggttagtctcatgtgaaaacacatctatatcaagcttttacacaatgcagttattacattttggggaatgtggttgtatgtgcgttactaagtatatcctaaagtctactgagtatttggaatttatagatacagtcagccttcagaaatatcatctaatttattcacatatccactttgtgaggcaggaaagggtaggcttatgtgagtatcctcattttccttactgaagtgggaaattcatcctggaggaaggatctacatgagagagacattcattgcctccaagtgagtatctttgagtcgtagaagagttatttgccttgaggggccttatattgactgagaaaggggggtggggggatgaggcatgctgacttgaagcaagacaaagacaaaaagctcatttactttcgtgatcttcaggcctgttttgctgccgagagagtacatcagaatactgtttggaagcccccttaataaatgcaaactggatcagaatttcagaatgacatttgcacacatcagttgccaacataatattcacttattgcatgattatttaattggtgactcctatgtacaaggcagaagctttaagccggggcagcagtgggaaacttaatgtccacagtccctgcctcctggagcttacacactggtgttccagggcaaaacaaaaactagtatatatatgcagcttaatctctacacaaagaggttcttctttaacaactgccagttcgcccctgtaatcccagcaatttgggaagccaagccaggaggatcactaaggccagcagtttgagaccagcctgggcaacatagtgagacccctgcctctacaaaatacttatattttttaaattagccaagtatgttggctcatgcctgttgtcccggctactcaggagattgaggtaggaggattgcttgaatccaggagtttgagagcagctttgtcaacatagtgagactctagctctacaaaaaatttaaaaaattagccaggcatggtggtgcacacttgtagtctcaggtgggaggatcgcttgagcccaggaggttgaggctgcagtgaactgagatcatgccactacactcaagcctgggtgacatagtgagatcctgtctcataaaaggacaggaaaaaaaaaaaaaaccctgcccctctgtggtctgatctaaggccaacccattcccttaacaatctcaattgggagatcctgggagaaaagaggaggtggggccagcagggcatgtgtttataccatgtggctaaatgctgcctctcccacgctctctcctcgaactctactcttcatttttctactggcaaacaagaccaaggacatctcaagtaactccttgagtccattagagcaggccagaagagctcagaatccaggattccacgagcacatgatcatggagggtgggtggggatgctatatctgtgtttcctcttttgagaaactaaaggaattgtgataagaggtgaagaactaggacagtgtcaatagagcaagggagaagggtacaaagagaagataaaaatcacaggaatttttgtgggggataaggaaggagaagtatctagaaggattccttgctttccatgcaactataaaataatggaactgattcataaggaaacaggttttgagtacggaaaatgcttgatttattctgactttgtttgcattcacatggaaatgtctagtgaatgtagatatatgagtctggagcttctaagaaaacttgggctggagattacaaattggagatctcatacttcttgcttctccctaccgaacttctgtgataccagccatttatggttttttttctatctcactggccactgcttttcattttctttcatgaatgcatcttctaacaccttcatttacatattcttcaggcaccaaaacccttcaaacccctctatccaaaagtaaaccaaatcatcctccacaccactcccaggctactgctactagccatctactgcttccgtgctccctgtctcaagaatgacataattatctgcttagccagcagatccagaaaactggaaagggtcctcattcttccttctctcttgtctccaactagctctttactcttgagaggctaccactcagattacctttcagatatttcctcctctttctggatcttttatagcaatcttagttcaaagtccttacctgggtcactgcatcagtctattgctttcactgtcttcagcggtgatctttctaaaatgcaaacagaatcttatcacactgacattgccttcttaggtaggtcatttccatgtggtggtaaagatgaccaccagtaacactagacttgcaaactatgtcatcatctttggaacctcagtggaaaaaccaagccatttaaagcgtattccagtaaaaagtccagcgtatgactcttactgacccacttgggtcatgtgcccattcctgaacccatcactgtggctgggggtctggagctctgattggccatccttgggtccagtacctttcttcagggaatggagccagccccatccaaatcaaatggatggagagagaggaagggttgactacctctaaataaagagcaatctggctatagaaggaataatgaatgaagggtgggcccaaatcacagatgtttcaaaaatcttttatttcacttttaagaaaaccatttcctacatgtctaccctaatagagtcacatatggctcctaaattaggcttctcactcagactctgtgtctctgattatactacttgttctgtctggagttcatttgggggataggtgggtgggagagagaggatagtttcagttgaggacatactgaatttgagatgtccaggagtggctgtgtggtcagttagatagatacatacacactgacttggaggtctgggacagagatatatatttcagagtctttggtgaagagatagtggttaaaggcagaagagagaagattctcacaggagatatataaaaggtaggaagagagaagaatctagcaatgaggtcctcagagttcattggacagaggagaagagtctatgatggaaactgaatagaagaagccaaaagggtagaagggaaagcaggcaagtgtggcatcagtgagtgtagggaatacaatagaaagtttccagagaaaagagatctctgtggtggataccattaagaaaacaaatcaaataaatagtaaaaagcatcccctggctgaagtggcatatatatcttcattgaagttaatgaaaaaaatgtcagtggagtatgagaaccagactggaagcctgaggggataaatggtagtgaagaagtgtagacagcaagtgtagacattcgatcatgaagagaagaagcaaaataaggtgattattagaagaggatgtgaagtccaaagagggctttttacaatttatttttttaggttggaagtacatatctttgtttttacttttttaaaacttaatctttgcaaattagggaggcacagccttccgtgtgaaattaaggtgagttcccaggttagaagaacatttgaatgctgatggaaaggatccagtgggcaagagagaggatgcctgggagagaatgcattctaggcttccttggaatgactgatctctaataggaaaaggacaaaaaaggaaagaggaggacacggtgtggatgaggatgctttctgggtgtgtctgtggagatctgtgtgatgatttctgttttctcctggaactaggaagcagagtgagctgttgagagtgcagagaaggggagggagctaaggacgatggaagcccaggtgaagttggtagctgggaactcaaagtgagtggaaactgctgaaatcctttactttcttcagtgagtctcagctacgcagattcaagcttgaataaagcagaaacagcagaggacagaggaaagggctgtttgggagtaatttcaaaagaaagactggaacgtgagactgtgttgtgaaagctggacaagaaaggtggtgaagttaaaaccaaaaggtctcaaaattaggagaaaatggaggggatcgtgcttttggtgaagtcaaagaccatgtaacactggttggggcatgagaagtctgtggtgagtaagctgagtttgagccgggcacagtggctcatgcctgtaatcccagcactttgggaggccgaggcaggcagatcacaaggtgagaagtttgagaccagtctggccaacatagtgaaactccgtttctactaaaaatacaaaaaattagccagatgtggtggtgtgcacctgtaatcccagctactcaggaggctgagacagaagaatcgcatgaatgggggaggcggaggttgcagtgagccaagatcgtgccattgcactccagcctgggcaacagtgtgagactccatctctaaataaataaataaataaataaataaataaataaataaatccctgagtttgaaggtagagcagtttggagtgttgataaggtccagggcatagagagagaaggtcactagatatgaggaggtcaaggacctgagaagccaggagggtgggtgggaatctgggcacctgttcgttataccataggtggattctatgccagaagttgaggtcgatagaacctcatggtgaaccaagtaccagtcttcactcagtatatctgtgttgagggagggggatctgtggatgccagtggcaagaaagaaaaagcgtacatgacatgagtctccaagaagtactttacagtgtcaaacaaactttaatgataaaattaaagaaagtaaatgaattttcaatgtgctgcagttttaatatagggtaattaatgctataaaataacagacaatttctgattaaaaacatttttttagaaagaagtgttctagcctggagtgcagtggctattcacaggctaaatcatagcactctacagcctggaactcctgggctcaagcgacccttctacttcagcctcccaactagctgggactacaggtgcacaccaccacacttggacaagatatctgagtttttaaaaagtatgtgagtatgcatgattatgagaaagttctgctatcaaaaagcataggagttttgccagccacagttgttcacacctgcaatcccaccactttttgaggctgaggcaggtggatcacttgagctcaggagttcgagaccagcctgggcaacattgtgagaccccatctctactaaaacacaaaaaaattagccagacatggtggcatgcacctgtagtcccagctactcaggaggctgaggcaggagaatctcttgaactcaggaggaggaggttccagtgagccaagatggcgccactgtactccagcctgggtgacagagggtgactccgtctcaaaaaacaagcaaacaaaaaataggagttttgtttgttgcatactaattggagttgaggcttcgattagcagatcttggggaccatacagaataagaggccattagctagcagggcttcctggaatgatctatgaaaaggtaacaaggccatttccccaggctcagtttcaaccgtgggagacagaagatgtctctagccatgatccaaagatgtctggttttaggataaagggaaagagaggaggaggtattatatttgtaacaatttataacagtagttggtcttagaagtcttcatgctgaaacaggcagggagaatgtattattatagaagccttcatattggctgggcatgatggctcatacctgtaatcccagtgcttcgggaggccaaggccagaggatcatttgaggccaggagttcaagaccagcttgagcaacatagtgagaccctgtctctctctcttttttttttttaaaaaaagaagaagttttcatactgaaacaggtgggaccctccagaaaaatcagactttcttagccatcacagcctttcggtgcccagaaatttgctttcatttggatgcttttgcccatcttcgaaaattctaagattgagcaggtggcctgggtggacaaggccaatggaagcatctctgcctctcccaaaatgcttctaaggccatttctctccttccaataagcaatactcgctgcttcctggcagatcttcattacagctggccccagggaattccagaggcaaccatgctcggggaagcaaaggctgagctctctgggcatgaaacaacactgaaagctttttgtcctagtacaggcgtgagtcctgatgtttttattgcaccttcacagttcagaattcactttctaaaactcctgctttgtttcctgaggatggacttcagattcccttaaaaatctagtaggtacactggaaaacccaaaagaaattataatgcagcccctaaattaattcaatatattgctatgagtcattggatatgaaggattaagaaacgttgacagcttttccatctgataccctgagataaggaggctcatggtgcctaatatcttacatattttatgtagaaatgtgatgtctggacaaatgcaataatctcttcctattgtctcattctcagaggtctcatcctggactgggcatctgttgcccttgtgtgttcagtgccctcattttatctggagaccttttctttcctcatgctatatggtccctgtggggctgtcagctactcttccctgttctcttctcccccatgcacaggggtgggacagtgacccagtctacaccttccttgtttggtagaatagtttgggaggaagcagttcttcccagcacccccagctttattaaggtgtaattgacaaaaactaggttttgtttatgtttttttttcagggagggggtgtagcttgggatgcaagcagtctccttatttactacatggaaagaaccagactgcagaatgaagccaagcagaaacacacagagctgagagatagagccctgatgatatcagctgtacttctagactcagccatgcttttccacttgtatacaaatggtagcccaggataaacatggttctgcactttgctttttaaaaattattatttaacttgatataccctcaagattactccacatcagtgtagagggagcgtcctcatggagttacacagcgcttcactggctggctataccaataattgattcaactacttctttattggtgggcatttaggattgtttccagtcttttgatatttcaaatgcacatgtcacttcatattttgccagtgcagatagtcttagacgtgggattgctggattaatgaggaaataccagtgtaatttgctagacacagacaaatgtctcctcacaggggttgctttgcattctcaccagtgatatgtcttgtttcccccgtgaatttgccaactaagtatgttgtcaaacctttggctttttttaatctcctgtattttaatcctgttctcttaagttttgcccttcttgaaaaggcagagaagtggctcagctccagccatagtaccaccgtgataagatgggagcactccccaggaatatgttcaagagacatcggtgaacagaatctagagtctatggaggaataatctctgttgggatcaaattttgacatagtcggtgatactgaaagaatagttcatagaactagaagattattattccaaaaggggtaggagtggagggcggacagtgagcatgatgggggttgcattgggggatgagcgctggaaaaattgtaaggaaaaacataggatgtttgtttgccactattagctgaaggagttggttttgttatctcaactgcaaactcataaattgtgaaggcgctactgatcattaaagagaatttccactatgtgaatcccctttctcttttccaatatgcacccccacccacccctgacacacacagcagaaagcaaattcaacattgttggagacatctttggaattgctagttgagtcatttaataactttttctgggtcttcctgcttttaaacaaaccataaatgtagagaaaatcatctagaagcatgctttgaaatttcattagtggagtactaaaagagttctaaaatgagaagacacattggtcactttttaaattacgtagagatttttcagactactaaagacattgttattttaaaaataaataatcactaaacttgtcaacattgtttattaaagccgatgttttagaatgcctaccctagagttgaaggacatcatttattttgctttttggaaaataaaaatgcaaagaaagtagaaaaaaacccaaatcatttcccttatcttgcaaaaattgaactcaaataattgagcatttctgtggcatctagaaaagtatagactaaaatttgccatcacacttcttgtaattggttgaataatggcctccaaagatatccaggtcttcatccttggaacctgtgaatgttattatgtggcaaaagagagtttgtatatgtaattaaagatcttgaggtgagagggtatcctagattatgtgggtggattccaaatataatcacgtgtccttattagagggaggcagaaagagatttgactgtagacagaagaaagaaggtggtatcatgacctcagcagagagagggctctgaagatggtaccagctttaaggtgcagggaggggctgttagccagggaatacaaggaatccagctctagaaggcaaggacactgattctccccctcagagagggccttgtaccttggcctggtgacattaattttgaccttctgggctccggatgtgcaaaagaaaaaaattctgctcttttatgccaccaaatgtgtggtaatatgttacaggggccagccatatcaaccaattaatgcttttcccaatttctaggaaacaggaacttgatgtttgattttaaagttcagtacatgtgttaatggggatgaagtagaatgtaaaggtatgataaaaataataataagaagaacaaaaaaaaacaaattttaggccaggcactgtggctaatacctgtaatcccagcactttgggaggccgaggcgggtggatcacttgatgtcaggagttggaggccagcctggccaacatggtcaaaacccatctctactaaaaatacaacaattagccaggcatggtggtgcatgcctgtagtctcagctacttgggaggctgaggcgggagaatcgcttgaatccaggaggcagaggttgcagtgagccaagatcatgccactgcactccagccggggtgacagagtgagactctgtctaaaaaaaaaacaatcaaccaacaaacaaaaaacaaatttggctgtgcttcttttaggaaaaaagacttaattgcattaaatctcaaatgcatcattagtaaagagcggcaactgagtttcctcggctggcattgtggtggtctagctatactgaagggtctccctgttataagtcaacctaattttttaaatgtgttgctaggcttgcagttcataagggaattcatcctttaaggtcccatatattagtcagctttggctgtgataatgatgtacagcaaaaatctcaaaatctcaatgtctacaacagtaagcatttatttctaatttgcattgcatgttggcagctgttaagctggataaccctgctccaggctccaggtcaggttcaggtctgtttcatggttcttctcattgatacttaaggagcaaagctcatctaggatgtgatgttctcatggtggagggcaggagcacaaaagaggtcccagaatcttgcaaacctcttatgatgtctgttttgaagtggccacactgccatttctgctaagatttcattggccaaagtaggtgcaataacactgggacagggacatttactgggggtgaggaagtaaatatttgccaaatactaatatggtctatcatactcctctattagctaaaaccaaacaatgatgcagtaagcagcaagtaaatgctattaatatatcaatattgcagttgaagggagactaaccctttggctggtggctgaacctgagacttctgcactaaattgagactctcaaatggggctaaagtggccctagagtggtagggtcccctgcttcttagtagaaagaaacacaaatccattttggattcccatagactaagactaaccaaataaaatcgcaaccaaatgaatttccaatcaacacacatggaatgaagttactatgagtaagagtcagcggaaacaatggaagacacaccccaagctttagatatgagaattaacaaaatagaaaataattagttatgaaatgtttaatgaaataaaatttggagacataaaataagaaactcaagaattgagaggctgatttgaaaaagaattaaataaaacttttatttatttataattcattaattaaattttttgagacactcaggctagagggtagtggtgtgatcacagctcagacaacctcaaactcccgggctcaaatgatcctcctgcctcagccttctgagtagctgggactataggcatgcaccaccacacctggctaaaaacctttagatacaattactgagtctaattgttgtattaaaaaaactcaactgatgggccaaacagaagattagactaaactaaatattgatttagcaaagtagactagaggtttgaagaaatcacccagagtgtagcagacagggaaacagaatacgaaaaaggttaagagatacagagaatagaatgagaatgtctaacatataattaattggagccctagaagaacagaatatagacaatggagaaaacagaatatatgaatagattagtagctgagcattttccagaaataagatttaaatgggagatagaaaaaacgcaaagtacattaggcaggatggagaaaaggaaagccacatgtagacaaattacagaaagtttagaacactgaaaacaaaaagcagctaaagataaggcaaatgacttaaaagggacaataattagactaagagcttactgttcatcatcatcaatggaagccagaaatcagagagataacatcttcagagtgctgagaatgaaacaacattatacctgggataagactacccttttatttttttctgaagggttgttctgtccccaagaaccctcccaaaataaactgattataaacctgagacttcagagtaatagggattgggtaaaaccaatcaaggacactaatcacattaagaacatctatttacatccagccatgttccacaacagctttgagtctatttctagtatataatttcaccctctctcatggatgtggatagacatttttggataaacaaaaactgcaagtttattacccatggacctttactaaaggaatttaaaaggatgttcctaggaagaaggaaaatgatcccaaaggaacatctaagaagcaacaaggaatccttagaaaagaaactgcaaaacatattggtaatgctagaagaacttgtataatataataataatatctaatttggtggtttcaaaaaaaagacaggagccaggcatggtggctcacacctgtaatcccaaaattttgggaggctgaggcaggaggatcgcttgaagccaggagtttgagaccagcctggacaacatagcaagaccttgtctctaaaaaatttttcttaaaaataaagaaaaaactaaaaaaaaaaaaaaaaaaaagccagagcaagactggtccttgatcaaaatagttttttaagcttcatgttcagataggggattaagatacgaacttttggtttgttacattaggcattgttaaaaaaaaaatttcaggcatattaaatttaacagattttaattgagcaaagaacagtttgagaatccagcaacattgcgcttccctggaatgagaataggttcagagaccctgatgctgctgtgtggccaaagacggtttatggacagaaaatgggaagtgacttacagaaaacagaagttaggtacagaaatagctgaattggttactgctcagtgtttgccttatttgaacacaatttgaagagttggcctctttgattggccgaaagtcagtgattgatacaagagtaagttacagtctgtttacacatctagttaggttatagctcattatgtatgaagaaacctttaggctgttaaacttaatttaacagcatgcatgtaaaatgtcaagcgtaaccggtaaaagaacagaaatgcagtgattaacatcccaacccatcccaagtgaggaaataaatgcagtaagaaaacaaagaacactatcattactcaatcagacgactaattaaaaggcatgaaaaagtacgtagtaaaaatgtgaaaacaaagccaggtattttagaaatgatgatttttaaaaggtaaatcgctatcagtaataaactaataaactatattttattaattttagagctctagaataaatagcacatagttattcaaaaatgtatttctttaaaagcttagctattgatatgatttggatgtttgttccctccaaatctcttgttgaaatgtgatttgcaatgttggaagtggggcctggtggaaggtgactggatcatgacggcgggtccctcatgaacggcttagcaccatcaccttggtgataagtgagttctagctcagttagttcatgtgagatctggttgtttaaaagtgtgtggcacctcccaacccactcttgctcttgctctcaccatgtgacgtgatggctgcccatcgccttccaccaatgattgtgagcttcctgaggcctccccagaagcaaatgccagcaccatgcttcctgtacagcccacagaaccgtgagcccattaaacctcttttctttataaattacccagcctcaggtgtttcttttctttctttcctttctttcttcctttctttctctttctttcttttttcagggtctggctcttttgcccagactggagtgcagtggtgtgatctcggcacacctcagcctcaacctcccaggctcaagggaccctcctgcctcagctccttgagtagctgagactacaggcgcaagccaccaggcccagcgaattcttgtattttttgtttttagagatgaggtctcactttgttgcccagctggtctcgaactcctggactcaagggatctgtccacttcagcctcccaaagtgttgggattacaggtgtgagccactgtgcttggcctcaggcatttcttcattaatagcattgcaagaatggcctaatgtagctatttttatacaaaaagatgagctatttacaagtcattctttgctacccacctctatatttgtcaaaaatttgaagcataatatagatttcttatatgatcataaacggcttaaatttgttacatttctgtgtgtcaaggaatggtgctgagttccaagatgataccagtttttacaggtttgtggccatcttcgaaatgtctgcttaataggccttctttttaaagaagacaaatcatcactgaaaattgaagagaaaaatcgagtgttatttatatgaaacttaaacatgtgacattatgtattcttcttctttgggtacttcccagatgtgattatgatctacatagttttgctaagacaactcaataatttgtaaagaggcttagcattaaaatgttccctatttgtgattacccattgtactttaaaattgttcctgctaatttttcatttctgatgatccaagtgaagagtatttgccaaacacccacagtatcaaatctaagatgctaaaggcagcctgcaaagggaacaaagggaaacgaattctagaggagactctacaagttaaggttctatgtaattgttgggtagatgcaaaacggactggaggaaacattgcttttgatacacctgctgaatagttccctttaagggttgtcctccctcacccccaaagaaattggattactaggttgggctaggtggctcatgtctgtaatcccagcactttgggaggccgaggcaggtggatcacgaggtcaggagatcgagaccatcctgactaacaaggtgaaaccccgtctctactaaaaatacaaaaaattagccgggcgtggtggcgggcgcctgtagtcccagctgcttgggaggctgaggcaggagaatgccgtgaacccaggaggcggagcttgcagtgagccgagatcacgccactgcactccagcctgggcagcagagcgagactccatctcaaaaaaaaaaaaaaaaaaaaagaaagaaagaaaagaaattggattactaatctgagacttcagagtagatgatgggtaaactgattgatgatgctagtcttctaagtatgtttgtttatattctacctcactccacaaaagatttgagtgtgtttataacatgcaatttcctctaagttgaaaaaaaacgaatgaaaaaacagagtggtggaaaatatataaagaaaaggcatataggctgggctcagtagctcatgcctgtaatcctaacactttgggaggccaaggtgggaggatcacttgaagcctagaattcgagaccagcctgggcaagggagaccccatctctacaaaaaacaaaaaaccttagccggtacaatggtgtgctcctgtagtcccagctacttgggaggctgaggtgggaggatcacttgagtcctggagtttgagggtacagtgtgctgtgatcatgccactgttctccagtctggacaacagagcaagaacttgtctctcggggaaaaggaaaagaaaaagaaaaaaaaaaagaatagtaatataaatctaggccagatgtctctaaacttggcagtggtgcattaggatcacctggggaacttttaaagctcctgatgcccatgtggcaccctgtactaattaaatcataacgcctgggagtgggaggcagagaggagcagtagtaaaaattcccaaatgtttctatgtatagcaaaatttggaaactaagctgatgttctcagccttaaatgcacattagcatcacctgggaggctgttgaaactactgatgtcagaatccattaaatcatagcctctgatgctggttaccgggcacttagtctatttgaaagctccccaggtgattgcaatgtacatgctgagtagagaaccacagcactgggggaaagttggtatatagttacaaaagggattttttttaatgggttcttttatggcttaagaccatgaaactggttctgagcttcctggtggccaaagtagatagaaaaacacagtcggttttaataattttggtcatctgccatgcaaaagcttaccagtttcttgaaagcaaaagagcttttcttcatagatctgaaataaatgtctagtttattagtcttctcacagaggatgttgatgtcatggatcacgattttataaacaccccacaataagtgacatatggcaagtttcatattatagttcctaataaccatccctcagggaaagacaaggacatgaccctgagtgcagggctataggctgttgcggtgggtgtgtgggagtagatgataaaagacaggaagagaaactgccacacccctctacagtttccagataacatagccttacccaaaggcgaagcctggaattgtgtacctccaggatgtggaaggcgtgtcctgtgtaattagaaattataattttctatcagcacattttaagaattatttatttatgtatttatttatttagagacacagggtctttctctgtcatccaggctggagtgcaatggcacgatcatagctcactgtaaccttgaacttctgggctcaagtgaacctctagtcttagcctcctgagtagctaggactatgggcccatgccaccacacctggcaaatttttaatttttttttttttttgtagggacaggggtctctctatattgcccaggctggtctcgaactcctggcctcaaatgatcctcctgcctctgcctcccaaaatgctagcattattattcaattacttttcttcctttataatataaactgtacaaattttacaaaggtttggctagtgagggtaggtagagaagcactgactcccatccatgagggtcacaggctagggcaagggcatctgagaatgcgtgtgtgtgtgtgtgtgtgtgtgtgagagagagagagagaaagacagagtgtgcacgtgtaccttttgtttatcaaaagactttagggttgtttttttttgtttttgttttttttgagacggagtctcgctctgtggtccaggctggagtgcagtggcgcagtctcggctcactgcaacctccgcctcccaggttcaagggatcctcatgcctcagcctccccgagtagctgggattacaggcgcccgccaccacgcctgggtaatttttgtatttttagtagagatggagtttcaccacattggccagctggtcttgaactaccgatcttatgatccgcccgcctcagcctcccaaagtgctgggattacaggtttgagccaccgtgcccggtctaaagactcgaggtttgaaagggttgaaaaacctcagtattgaaagaatggacagaaatctgacttttaaatagtcctccataaatagttctcattgggggttttgtggcctgtaagtactgtggacttgacggctcaagacttctagagaaggcttctgagtaggatgttgactccatggggctaagtcgtcaaaggaaacccattctacggcacaggttttaagccagtcatgctgcaggaaggcaaaggagagcttaaggtagcatgggtgggctcttttgaaaacgaactagcagggcgaacagcagatatttagttatgtagctggcaacgaggaatatgattccttcgggtcacgcgagttctctctgaacttccttgaatgaaaatcctaaatgcatcctggtaatacccaagtaggcactttgacgtttccttttcaaaggcaaatggaatgttctgcgtctgttttctttttgaactcccaactgcacttaacatctaaatttaaggaaaggcttccgaaaaagtcgactgacgaatttctttcacttatttaaagtagtctcttgcagtcctataaatcggaaggattaaatgaactgcttgctagagaaacggtagctgggtggtgggaagaatcctacggtggctaataagacgtctcgatcatttgcatatgcaaaggataaccttaagcttgagtttgatatttcacgttgcggctcacaaatgaactgctttttattcaaagaaccatgctgtctgttttcgcgtgggtgggtgtgtaaccggggcgggcgctatgttggttttgttccctgcaaggttgacacaggcaatggcgacttgcggccacactggggcagcctctcctcggctggcagccgggccgggcggctcgctcccgggagctgacaatgtagccaagtcctgctcgtcggggccgcaaagaatttaaaggggtctagaaacatccatcttttccccttttcacagttaacagcgagctcagggctctcggtaaaaagaccaccgggaggaagaaacgctcagggcgtttttgttattgttcgcaaaatcctctatcgcccccaaacgtccagcccgccccctccctaaagcggagggaaaccgggagaggagggagggtcggcggcgccggccaagcgcgccagtacacgcccctgcggatccgccccgcggccgggtgacccccgccgcgccgcgctggaggccccgggccggggtgggcgtggggctgaactccgccacccccgcagcccgcggcccgctcgccagcccggcctgtgattggcttggggggcgcgtgtgcccgccccggcgaacggggagggtaccctcgcggcgccggtgggaggaggcggaggagggggcggagagagcgggggcccggacggcgctagcgaggaggcgggcgagccgggtccccgggagcgcagaggaggctcggaggggggcggagagcggcggggcgggagggaggcgcgggtcgcggggagggaaagcccggccgggtctgcgccgccgccgcgcgcagtgagaggcgccggggctgccgcccggtgctcggcgcgctctcgggagccgcccgcccgctggtcccgcagccttccgggaggaagcggtgccggcagcgtccagggcgcgctctcgggcaccctcacctgccggcgcccggccgcttacccggcagggcgtgcgcagggtagggtgcgggaccggggggacctggaggcagaggggagaaccggccgtccgcgccgcagcacagccgctgggagcgcctcagaccccgcgcggggcgccggctccatggcgaccgggctcggggagccggtctatggactttccgaagacgaggtgagtggcacccccttcctgctcgggactccccggggagttcctatcccgcgccggcagggggaggggaaaggggccgtccccggggtgctcgtgcccagcgtctgcaggggagccccaaagcgggagcgccccggagcgggatccaggggagcttgggtccttccgcaccccccaccctccgcaagccgagctcattgtttgtaaataaagcggcgcgacgcccttggagctgggggttcactccgcagctcctcgctttcgggaggagagggagggggcatgcgtgcctctcttccctcttcctctccaagcagcgtctcccggggctgttgggcaactttccgcctctcgcccctgcagcccgggagtccatgatgcatgtcacgtctgggtcgcgcggctggagacccgggactgcggagaagccggatcgtttccccctggaactttctctctcatgattgtgtggatcagcaggcgctcagaagcctgtgcgtgcttatcccggcgggaatgggggacacgctgcgtgtgtccctcccctcgttttgcaaagtctacggccaggattgtggatttcggagcctcggtgggggaggtgttcaaggctggtggcaggtgctcctggaaacttggggaggaagcttgcagccctgccattttttcctcccgaggattcaaagcccggcacctccagggtgggtggggagaggaaagcttaattgatctcttttattaataaagcgactgaataagccacgcctcccaggcggtcggtttcactggaaagggctttgtttttaccttcattctctcttccgtgtctcccactccccccttttgaaacaatcctgctaaatcactgcctagtcctctctcgaccagccacgctcggctcttattggtatgttgctctgccaaaaaggggggtgggacgcttgtcgcgggcgcggcgtgacaggcaggctggatggagcaggtaggagtggtttgccatctggcggggtgcgcgctcaggtctggctcccctttcgagaggtgaattttacaacccaagaagcattactcagcagggaggtatttcctatcctggttgtgcatttcatgaaaagttgatgcctggaaattcaggcgttctcgatttctctttcttcccctccctcctttcttttcagaggttccctctttctctcgtgttgggggtggggttggaagaaaggctattatctgagacaggctcgcgttatggctccgctttctgcggctctcctaccctggcatggtgtgtgtgtgtgcctgtgtgctacgtaagtgtggaatgaaaggtattttggggtgggaagggtgtttagggtatgaatttttttcttagcggtgctaggcaaagcttgatgtatttatttgatcaaagaatgatcacagtgcaaataatgtgtgatttgtgtgtttattttgcctcgctgtgcttttgtaaaataatttcccgttttgtgtaactacctggggataggtgacagtagcattgtttcattgacccggggggcttctcctctccctcctggcttctctctttgaggagctttcccttgcatcctctacttctccatttaattagtggcagtagagggcaggccctgagttgcagagacgcagacattcctaaacaaaggggctgcttgggttgacgtattgtggggggtgggggtgaggacagctgcatttcatcctaggttcttttaaaaaatgttttaataacatgattatttgtaaaaactcccccgaaaaaacgattttaagagtgttttgggaagtgcagctggataaatgaaacacgttaatgtcactgttgtttgtgctttatttacattggcagtgagtgtcagaatctacctagagcacatcttgccacttttgtccacaggagtcactactaatcatcataactgatgtctagtgtgaaagtgaagcttggaatgtaaacagagtccgagtgtgtgttggcatgtgactggattcactcctgcatgttgctagaagggaatttggggctgtataggaaatagcaagaggtgatgaagacaccttttattatctatttattgccatgtcgctggtagtatttagttccacacacattgtatttcacaagatgagtctcagccgtcttcctttttcaactttctcctaccagtgaaaaaataagccagggcagttctgatgacttcacatttcattggtatttgtttttcatgggcagtttcatgctgtcacgttgcccttcagagaatcagggaatgccttcgtagaatattaacgacaaattgttgaatttgcacagcttgttttgtctccctgaattagtatgtgtaagaaaaaccaatggaagattttagcaggctctgaaagtagaatgcccgctgaagcaaacggcagggttgttcttccaaggcgtattaaatatgggtacacttagtttgcagacttggtgtgctgcagaatatcacatatgaagatattttgaccgctatttagaagagtgacctcataaatcttttagcaaagtagacacacatacctaccacatttcttaaaagtagattcgtattttgatttgagattgttgaaaagcatggtatgtttggagtgcacttagttatgtcccatctcataaagactgttgagctctctgcactgctgatgatgaagcattgcatgaacccagaaaacggggatgccaaagcacagggcttaggtgctgttccttgcgtcatcagcagaggtctgtccactttgtagaaggtaaggggttgagatgtgggctttgcttgtgtgaatgtatgtgctgtttaattttttctgtgtgtttcgggcggaggtttctctggtgagttataattcatatttaccctgatttaagtcatgtcactttaggtagccagattcaaaaccatcagatgaaggacttttggtgttagagggattagcagtttaacaaaacttctgattcatggcccaagatcagatttggtttggaatcagaacactttggactagtttctgcatctggcttgagtccttgtggatttcttgttttatttctttatttttggcaatctgtagtgcattttggcatagtttacttatgaatgttaccgctaactttctgaaatcttttattccattttagaaaggtatcatttattgaaaagatttttctactgaacaaaatactgggattgaatggcagcttcttatcacattagatatgacattaagtaatttcgttagtagttaaaatgaagcaaatggcatagaaatgaaggccaggctgacataggataaatggcaccttctctccttatcctgtacaaacacggatagttggctacttttgaatgcctcttctataccaatggtaaaaatccggcttaattggggccacattctagcctagtcacaatcagtggcttgcattatgtcctttgagatgtggcagatctgcttataggtgccagtcaccacggctccctgctggcttgggggtctttctactcatttacatataattatctacttcttaatcaaccattaaggttaacttttggcatggatcctgtatgcttttcagtttaagatgctgtcacttttaagatgcgccatgagagcaaagtgctaagccttgtgcacatactatgtcatttagttctcatgagaactgtgtgaggtaggctgtgatttacagatgaggaatgaaagctcaaagaggttacgtgacctgcataaggacacaaaacaagttaagttatggagccagctattttgaatagaaaggcctagtttttaacatgctgaatatcctccccttctgacaaatgccttgaaaggtcttactatctagattatttaagataatgtaagagaaataaacaccactggttgcaaactgatggctgctgggcccgatttgaccaggaaccctgcttaatgtggtctctagagtgttttaaagcttggaaatttcatgaaaatggtaaaaatctggcttaattggggccacattctaacctagttacagtcagtggctggcattatgtcctttgagatgtggcagctagttgtgctatggttgcagtcaccactactttctgttgtcttaggggtctttctacttgtttacatataattatccacttcataacaaacctttaaggctaacctttggcgtggatgccatatttctttcactttagtgtgctgtcacttttaagatatgccattatttcatgtaccacgaagaaaaaattgctgtcaagttatgacatactgtccatcttatgaagcatccttatttcagagaagttgaaatatgagaaaaaggatattttagaattgatgaattacagtgactagaaacctgggaaaactccatgccatcagtttcaatatccccaatcattcagtacttttaagtcaacgagtagtcagatttctgcttttctgtgtttgaggaaagtgctagaaaaagagaagtgctcttaaataggcattagcacagaaggaactgggggcctagatcatagccaactggatggccgtctgtaagtgattaagaatagttgttagtttttaaaaagtggcctgtgtgtattttcaagagattacttgggaaaccctatgtgccatctttgcagctgtgcaaaacggtgaggacaagattgctttcaaaaattgtggtttagattttgcttggatctcaaggtgaatgctgacaggccgttttctgaagagagagaaggcttgcccagtcatgccaagtccaagtgcctgtgtcgggcctagatgctggatggtagactgtatacccaggacatataggtaatgtttgagaaacaaatgttaaaaggacctagttttcatggtgacatttaaaatcagtttttaaaattcatgaatataacatgttgttttaaaatttgattatagggaccgggtgcagtgatcactcctgtaatcctagcattttgggaggccgaggcaggagaatcacttgagttcaggagtttgaggccaggctgggcaacgtggtgaaaccccgtctctacaaaaaatagaaaagttagccaaacatggcggcacgtgcctgtagtcccagctacttgggaggctgaggtggaaggatcacttaaacctggaggcagaggttgcagtgagccaagatcatgccactgcactctagcctgggcgacagagtgagaccctgtctccaaaaaaaaaaaaaaaaaaaaaaagactaatgaatagaatttattttcttcaatgatgtagtgtctgtggaatttgtagacattgacatttgaattttcattatatttagttttattaaatcagaatgttatgattgtttatttcattattgaacatcagtttccttaatttaaggaataaaaataattttgctcaggccagacatagtggctcacatctgtaatcccagcacgttggaggccaaggctggtggatcacttgaggtcaggagtttgagaccagcccagccaacatggtgaaaccctgtctctacaaaataaataaataaataaatgaaaaaaaaatcagctgggtgtggtggtggacacctgtaatcccagctactctggaggctgaggcaggagaatagcttgaaccctgaaggcagagattgcagtgagccgagatcgcaccactgcactccagactgggtgacagagtgagactctgtcacaataataacaggctggggcagtggctcatgcccgtaatcccagcactttgggaggccgaggctggaggatcacctgaggtcaggagtttgagaccagcctggccaacatggtgaaactccgtctttactaaaaatacaaaaattagctgggcttggtggcaggcaactgtaatcccagttactcgggaggctgaggcaggagaattgcttgaacctgggaggcagaggttgcagtgagacaagttcgggccattgtgctccagcctgggcaacaagagcaaaactaaaaataaaaaataaaaaaagaatagtaatagttttgcttaaagggtgaggacagtgacaaatggtgatcctcagatgactgtagtttctttaccattacagaatgcaattcaaatgaaaaccattgcatggtactcaggcatttcttcaatgcagtgtgtgcccacatcaccaggaagcttacttgggaaagtttgttttgggattctggagtacctcaatatatctggtatattttcccaagaaaagtgaataatcttggggggccgaggtggacagattgcttgagcccaggagtttgacaccagcctgggcaatgtggtgaaaccccacctctacaaaaaatacaaaaacttagttgcgtgttgtggcacgcacctgtggtcctggctgctggggaggctgaggtgggaggatggcttgagcctgggaggttgaggctgcagtgagccatgatcatgccactgcactccagcctgggtgacagagcaagacactgtctcagaaaacaaaggcaaacaaacaaagatcaccccaaagaagaactcccaacatattaaaagtcattgagttttgtacccttcaaatggatgaattgtgttgtgtatgaattacatctgaataaaactgtttaaaaatattaagaatgattgagtgtgacattattgcagcagtacattggagtttctgctaaattacttttgcattcatttcaaaaggaagcaactatgcccattgctaatttaataacctgtttgcttgtgcggtgtttaaaatggcatcatgaaaacatggcaatgtgtgatagattaagagccaattaaattttttattttgagttacaagatctgcattaaacagattttattgttgcccttgaatttccagtcttagatgagtagcagcagtgaaaaaaagagatcctaacttaagagttttcaagctttttgatgttgcaggtatttgaataagtgggtctgtcttactgaaatatttgttaattagcgataaagcaaactatatgttgatcttttggtagtccatgctaaggaggattagaataatatataaataatataatggtaataagtatcagggcaggaggattaaagaagggtggaagaagtgtgacaaaatgttactttctgtttttacattgtttctcttccaggtcacaactgtatttcaaatgtatttcattttcagactataggtggcaatgtttgtgctgttcactgtttaatgttactgttggctcgggtgttgcttgttgctggaatatggaaatgatagcataatttagagttgagaataaaaaaaactagatttagaaaactagaaactagatttagatttagtagagactttctaaatagtcctagttctgctgtgtggacccttctgtaactttctgttactctgagaaggagctgataattatcacaactactggtgtttgattagcagagacattcttgattcctgatgcaagaccgtggctgaagttgtagcagggcgtttggtggttggcgatgtaaagatctgggcctcttgtttcatgaataatagaatctcactatgattgtaatattttgttttgaactggagtgctgattattgtaatccctttaggtgagaaaagccttattatataagtgtatctggggtaactagcttaaatttgacactccagtcaactttttgtccctgacttcagtcctgcattgattcaaaacgcaccaagttaaatgtcaaggctctcagattcccttgctgtcatcaaattcagtgtttggtgacttcttggcaggcagacatctaccaagagattttgtattctttttatacctcctattcaccaaaagaaaagggccattcaaaagtgagtttttctttttttttttttttaagtttaaaaagctatgatgtggccacccatggtggctcatgcctataatcctagcactttgggaggccagggcaggcagatcacttcaggccaggagttcaagaccagcctgaccaacatggcaaaaccccgtttctactaaaaatacaaaaattagctgggcgtcgtggcgtgcccctgtaatcccagctacttgggaggctgaagcaggagaatcgcttgaacctgggagatggaggttgtggtgagctgagattgcaactctgcactccaccctgggtgacagagtgagactttgtctcaaaaaaaagctgtgatgtgaaacctgttctgtgaaggtggaacttggaaaggcttgtaaggatggtggtcccatgaagaggatgaacaaaccaagggaactgtcctcttgctggtttgggtgatgtcccatcacctgtcactttgtttgtttgggctgcagtggaccaatggtttcccaggcacactgaagtgacatgtagatggattgcttgagtggctccggcatgtttccatctcctgtctaccaggcagagaccgtgttccctgttttgaggggatccagaagtgcagtgacaagggcctgatttgcatctccagctcctggtcttgcctgtgttaacaattttttttttttctttccagatggagtctcactctgtcgcccaggctggagtgcagtggtgcaatctcggctcactgcaagctctgcctcccgggttcacgccattcgcctgcctcagcctcccaagtagctgggactacaggtgcccaccaccacgcccggctaatttttttgtatttttagtagagacggggtttcaccatgttaggcaggatggtctcgaactcctgaccttgtgatccacctgcctcggcctcccaaagtgctgggattacaggcatgagccaccgtgcccggccaacaatttttacattctaattaatttccagtttccaacctgactcaaggtttagctcttcgtctcttgggtgcagttttggatcatgtcttataatgtatatttaaaagtgtgttgtaaagctggaattcccattgtgggtaaatgctgagattgttgtaatactgagaagtgcacttgggaaccatggccaacactgccctagctgaccggaggttgcactgagttgtcccctttgaacatctgttatgaatgaatgttggaaaatgcaaagccaatcatttcttttacctgacctatgtgatgttaagttttagttttatgttttggcaagtgagtgttggatgtcactaatgtgaggaggccggtgagggcagactttgggtcagaggtaatgtaggagatgaagaccctttctattaatttttcttgtttaattgaagatgttcgtgttgaatgggttttatttacatgtataagttctttttttcttaatgctggaagttactttggtttttcagaaaatgcaagtaaccctaatctatttagagaattactttgcttagtaagcactcagtactatttagtaatggggaaaaaatgtgtttgtgtcccacagcgtgacaggctccacaaacttacttacgaatctcctaactaccctgagaacctgaagaatgggactttgtggagaatcttctgctttctttgctagtctctatttttccttctcagttattaagtgagttgtctttgggtgtcctcatcatgctgacttcatcttgcccagtttgttttgggtagaggaaggagtgcaaggtttaaaggaaaagcaaagcctgtacaacatggtgagaccccatgcctgtggtcccagctacttgagaggcccaggtggaaagataatttgagcaccggggttcaggaatgcgctgagtaatgattgcaccaccgcactcgagtctgggcaacagaatgagacctcatttcaaaagaaaaagaaaaagcaagactgaatcatttcactttgtattctcctccttgctctcattccttttgtgcttcatgcattgtgtgtgacaattggatgcagccgtaattattgtcagtaacttggtttttaagcttcagactgtatttcctcctcacttgttaacaccagaagataaatgaatgtggctcttggattgaactacatctacagggagctgaacttcccatgttgacgttgaattctagagtatgcttatgctgattcttgagaaattggtatgtgccgtgcctttggaattgataccttaattttcagtgaatattattggtattattattaaagagaacactttaagccaggagtaagagcttttcctccttttgagaagtgaggtacagaagagtatactgcagctgtgggagtgatgggtggggtggggcagtgttgaagaatatttaataccacgaagatgtcaccagtataatattaaatagaaaaagtaggttataagacagtggatccagtagaatcctattgtggttaagtgtttatatgtagagaaaatgactaggggctaggcacagtggctcacgcctgtaatctgaaccactttgggagatagaggtgggaggatcacttgaacccaggagttcaagaccagcctgggcaacatagtgagactctgtctctataaaacaagaaaaaagaaaaactaactagggatatattccagcatgttagtggaggttatctttgagcaaaggggattataggtaattttttattgtcttgtgttttgcttacatgtgttttctatatttctacaataaacctttttttcttaatataaaagtaagtttaaaagtgagtttaaaaatccctgaaaggcatgtacttcaagcttcaagtgaaagttatagtacttgttcagcacaaatactgatatagtgtttgttcagtggaacacttatttagggtctgccttgtgttttgtgtctaaggattaccaggtcattttcatattaggagctcaccactacgttgggagttggagagatagagcaaggactattttaaggaaaaaatgactggtaaattgtatttctttttccccacttgcagtttgcaaaatagatgtttcatttctctccactgtggacacttaaagtttgaatttccatccttctgtgcactccagttgcgtgaaagtaatttacattgctagtagtggtttgggttctctgaaattttttgtgtgtgctatggaaattgtctcctgtgatcagactcaaatccatttctccttattattgttttcttaggttttgagttagagaccttttcatgaccgtataaggtgttgaataggtttagatatcaaagtgatagctatgcatagctatactcacctgtgagcggtcagctcttcagtgtttctttcaactgacttgtaatatccagccactgttgggtgtgacctaaagtgtatctcttcccaaacagaagggaggagttgacaaacaccatgttacttttaatcagagacttgtccttgtcccccttcccccagccttttaataattctgaattcatgttgcagtcgatatgtgtttaaagtgttggtaggtttcttgtactcacaccatcctcctccactcctctcacccccaaaaagtgacagctgacagttgatggcatcttagaattgtgaggcttgagttggtctgtctcaattcgtgttttatggtggcccataaattgtgaaagataattgatagttgtcatgggaactagttatgttgttcagctatgatgtctcaattaggaaatgttcacctagacagtagggaaatgggccagctcagggatgtcttcaggaaccaggttcattgttttttctgctttcccttctacagcctggctctttccagggcttcttggtcctaggctggctgccactgacagagctatgcctttttttatttttttactttttttcaagacagtctcactctgtagcccaagcaagagtgcagtgacaccatcttggttcactgcaacctccacctcctgggtttaagcgattctcctgccccatcctcccgagtagctgggactacaggcatgtaccaccacacccagctaatttttgtatttttaatggagatggggtttcaccatgttggccaggctggtcttgagctcctgacctcaagtgatccacctgcctcggcctaccaaagtgctgggattacaggtgtgagccaccatgcccagccagagctatgccctcttttttttttttttttgtttgtttgtttataactgtgtacttgtaaaggaaagagaacggcctcctgtgccttaaatcttctgttgtgtctcagggcccacagaggctgagatctgttcatcctgcaaccagtcaccgtggcaaggaggagatagaattacctttttttcttaccttttgagccaggggtaaagtcaggcacggtgaccctgcattccacaccttggataatccatccaccttcagaaatgcccctggcttcgtgaaatgcacatgctccctttctccagggaggtgacccgaatatgcagctaagtattgcaaggatttctgggtaatattacacctgaaaggaggttttttttttttttaattatctggtgatttatgactaaataggctatgtctctcaaaacattgaacctgcaatgggcaagaaagaacaggatgactacaatgaaccttctatttggaaaaggggaaaataagacactcacagtggggtagctggctgaacaggaacagctgggagcgtttgctttggtcagccggtctggcagcttgcctctgctgaagtccgtccagggtgagaatctcgcttggtcattgtcctctgcagctgcacctggatggggtaggcactggcaaagctccttttcttgggtgctgcttggcattagtctggggcttcaggattggttgtcttggggttgaatagccacaggcttgttccagccttactgagaatgtctttggcaaaactgctcccaggaaaactcaggctctgagttttgtgtctagtcaattccatgggctggtaatggcagccagtgatctcacctagatgaggtctgtggttctgggaattcctgggtcttaacagtaagtcccacagccctgctaatccccaccacatctgccttgaggcaattttaaaatagcctagaatgaagaggcacacagttttgggtctaacagacaacaggggcagtttaacccactctgcttttgctctctggtgtatcaagaatgagcaacttccccacactgggattgtgggactctgagtacccacttcccttcactcagccattccaatttcttaaagcaatttttaaaaaatggtggtaaggccggccgcggtggctcacgcctgtaatcccagcactttgggaggctgaggcaggtggatcacgaggtcaggaggtagagaccatcctggccaatatggtgaaaccccgtctctactaaaaatacaaaaattagctgggtgtggtggcacgcacctgtaatcccagcctctcgggaggctgaggcaggagaatcgcttgaacctgagaggcggagattgcagtgagccaagatggtgccactgcactctagcctggcgacagagcgagactccatctcaaaaaggtggtaaaatacacatgacaaaatggactctcttagccacattaaagtgtatggtttggtggcattacatgcatgcacactgttggcagccatcacccctgtctagccatggaactctttcatcttgcaaaactggaaatgccttactcgtgaaccagtacctccccattcccagccattccagtttcttgtagcgcatcttctctttgatacaaaatctttgatagggttttgattgcaggcaacagcaattgaatctgatgaattcaacagagaaagaattaactgaaggaatttggggtagcactggagtacttgtcacactggagagacaggcctggacaggggtcagggaccaatgaagcctgggcatccagaatcacagctgttagtgtgttttattatttaagagtgagctcagaggtcactgttcaaagctgggcactctgtctccaactatccctcttcacatcccagactcaatagcacctttctgcatagttacttctactgaatacttcactgacagcaatgaaggattgttggtttatgtgtctgtctcgtatagattaggcacctcttcagagccacagccacatcccaatgatttatctccagtcccaagcaccgaatcagaccccttgaccgtttactccattcaagtgatgatctcaggttagataatcatgaggtcagttggtcaaagcaaaaacatctttttaaatgtctttttgaattctaatttgtttatgcaatatagattactcctcctattttcttcttctttcttttttttccttaagagatgggatctcagtatgttggccaggctggcctctaactcctgggctcagcggtttctcccaccttggtttcctaaagttcagggatgacacgtgtgagccaccgtgctcagcccctcctcctattttctagtctgtgtcattactgagaattttactctttattctctttcctcaaattctaagtgaaaagacctctcctctctaggccccaagaaaggcaaatgtgttccacggaagaaggttgcagacccatgtttgattgctttataccatatttcccccccagaggctcttaaaagggcaaagaaggtgttgaaactgccactgtcaataccagagcatctgcttgaaaccaatgtttcttttgtgactccaggatccatgctgcctggctaagaagggcagtgtcctccttgcccaggtgttaaaccacaacagacctagaaaactgagatgtcactcctcccctggagtgacagcagtgttaggaagtttggaatctgccaacccacctcatcctgtccatgaagttgtcacttggctaggtgttgatgtaaatgtgctacagaaacaaactcacctcttgtgggacatggtgactctggttagtaacaatgtattcttcaaaattgccaagacagtagattttaaatgttcttcgtatgcaaacttggtaagtatgtggggtaatgcataggttaactagcttgaattaaccattccgcagtgtgtatgtatttcgaaataacatgtacatgacaaacagatacaattttcatcaattaaaataaacatttagaaaaataacataaatcctcacaatagccctttgaggtaggtgctgtcattttataggtggggaaactgaggttcaaggaggttaaataacttgcccagggtcacagaactacttagtaagtggctgagccaggacttgaacaagcagtccggttgtagacacccggagtggaaccatcacgctgtggtgtgtccgggagtgcttcaagcaggggttggttgggggtggggttggggtggggaaggcacagctgaggcctgagtggccagactgtaaaagccaaaggaagaagtggctggatgtgaacagctttgtggacctcatcaaggagctgggactatattgtttgaggcaccttgagaaacctgttgagatctgggcttttcttattagtaagtatgttgcccagactggtctcgaacccctggcctcaggtaatcctcccatctcagccttctgagtcgctgggattacaggtgcaagtcgttgggcccggcaatctgggcttttctaaagctcaccatgcagctttggggagattggatttgagttggacaaccctaggcagttgcagagctgtccaggcagaaatggtgatgacggtgaaaatgagccaggggataaggcaggaggtatttaggaggcagattccattggatttggtcactgattgattaggtacaaaaaaagggaggtgtctagaataatccctaggtttcttcagaggactaggtagatgggaggaggggaagaagcctatctctattaaatacttagtacagtggctctaaactggggcctgtcttgcacccttccttctcccctaggggacatttggcaatgcctggagacttttttttgagacggagttttgctcttgttgcgcaggctggagtgcaatggcgtgatctcagctcactacaacctccgcctcctgggttcaagcgattctcctgcctcagcctcacgagtagctggggttacaggtgcctgccaccacacccagctaattgttgtattttttagtagaaatggggtttcaccatgttggtcaggctggtctcaaactcctgacctcaagtgatgtaccggtctcggcctcccaaagtgctgggattacaggcgtgagccactgtgcccggccgcctggagacatttttgattgtcacagcttaggagatgcctctgacatctagaaggtggaggccagagatgcagcagaacatcttacacggcacagtacagctcccacaacgatcatctcgccccaaatgctgccgaggttgagaaaccctgctgtagtgtagtatcagttttacgtggttatctaattggatccgtgagccagtcatgttagatcataaatatgatttttcctgtttttcagataaaaaactgaggcatagacaggatgggtcacttggccaaagctctgcagctagtaagtgttagagccagaatttgaacgcaagtcttccagatgtcagaatctactccttctgcttaccctgctgcttcatatctcacagtgatgccaaggaagatgcacattggactgtgggttgttttttttttttttctttctgtcatggtggctccagactagaggaggcaggaaggaaggtggttatttatagtcagctgtgcataggatcgatttttttcaatcctgaaggacttgcagcaggtagttcaaagaaacctcctttagacgttgactttcccttgcagttgtaaatatgggaacatttaccatcttttgctttaaaatatactgttataattaaggtaaaatgtaaaacttataacttaaaaactttactccctgtgcatatgaactatggcaagcttctcaaattaattactatccctttgggataaattaaaatattttgatttgctagaggtaaggagcccttttgagaattagtttgttttagttgagaatgattagagggctagaatgatatatagctctaaataggaaggtttctgattcttttggctactctccacttttactggttattttccagttctgggaagattctgcatgtatgtagcagcctcccttggctatccatggtattagagctctagggacagagttctcctagttgaactcttcataatatctcattattggtattttcaaagttatatgtgtattttaagatagtctttggatgatgttccaaagaaggctgctttgttgagattgagatagttgttttgcagttgtgatttctctttgtaaaaagaagtctttgtgtcggtcccaggtcttattttttgcttgatcacccagtacgtgggtgcacttgggctgttgggaccatctggtgagtgtgaggtctctgtacttcacctgtggagtctgttgtcctgaaaggtgccggctcaggtggtggtgctttgaggggagcttgtttgctgcaccttccagtctgctagaaaatagatgcttagaggggcatttcggggtggaatctgatcatggagtttggtgagcaaacagggcctcaagttttatgttgtgagaaataaatactgagtttatgttttaattatggcacagattaatacaaaatctggtgaaaaatggagaaaaggagagcttaaaacttagctgtttgttgctgtcatctaaatgtagttggtagccagcctagatgggaccacagcatggcactaaagcgcggctgctgcttttcagatcccatgttcatattcgcatgtgtggagcatgaaagtaccaatagaaaattttgacaaagaaattgaagggttgggccagggacggtggctcacgcctataatcccagcactttgagaggctgaggcaggcagatcacgaggtcaggaaattgagaccatcttggctaacacggtgaaaccccgtctctgctaaaaatataaaaaattagccgggccttgtgacaggcgcctgtagtcccagctactcgggagtctgaggcaggaaaatggcatgaacccgggaggcagagcttgcagttagccgagattgtgccactgcactccagcctgggcgacagagcgaaactccatctcaaaaaaaaaaaaaaaaagaaatcgaagggtcgataatttcatttatttgttcttttttttttttttttttttttttgagacagtatctcactctgttgcccaggctggagtgcagtggcgttatcacggttcactgtagccttgacctccgaagtccacacgatcctcctaccacagcctcccaagcagctgggactacaggcactcgccaccatgcctggctaattttttatttttatttttattttttgtagagacaagttcgtgctgtgttgcccaggctggtctcgaactcctgggctcaggcagtcatcctgcctcagcttcccaaattgctggatttattgtcatgagccaccacacctggccagggtcagtaagttaaaagataccttctaaactcagcccaatattgaagagtaaacataaaaatacatgttttgtctattatactattactgttactcaatgcttaactaattgtgcttatgtttttttctttgccaaaatttctcttcaaggagcaagtttttctaatattgcttttcttgggaagaacaattagtcacgagatagtacagcttttttttttttttgagacagattctcactctgtcatccaggctggagtgcagtggtgcgatctcggctcactgtaacctccacctgccgggttcaagtgattctcctgcctcagcctcccgagtagctgggactacaggcactcgccaccatgcccggctaatttttgtattttttgtagagacggggtttcaccatattgtctcgaactcctgaccttgtgatccacccgcctcggcctcccaaagtgctgggattacaggcgtgagccactgtgcccagccgtagtgcagtatttttaagcttcggtaaggtagaacccctttagagaaaaaacatcagtgagaagccatgttgccttatttttactataatgtttctttttttttttttttttttttttttttttttttgagacggagtcttgttctgttgcccaggctggagtgcagtggcgtgatctcggctcactgcaagctccgccttccgggttcatgccattctcctgcctcagcctctcaagtagctgggactacaggcacccgccaccacgcccggctaactttttatatttttagtagagacggggtttcaccgtgttagccaggatggtcttgatctcctgacttcgtgatctgcccgtctcggcttcccaaagtgctgggattacaggcgtgagccaccgcgcctgacccaatgtttcttaaaatacatccaaacataaaaagaacaaggatgtttatagctggtatatcaccatagccatcactataacaccgtaacaaacatgcaaatttgttacaaatctaattctcaaatgaataccattcaaattaatagcatgattttaatgtgacaggtgatgctattttattaaaactctatcatctgtgctcaggaagtcatggctgctagggtaagttttcctttcctaaccaattatgtgccagttggtggtaacataacaccgttttcctttgtttcctttattcaaacttctcttgtactatgtactagagcatgaaaacgtctttgacctacagttatgttagctggagacacagcagaactactgttgtcatcttgatcctgaatacaagggccgattgaagccccagaaatcatggggaagtactcgtttacataaagtggtcatgtagataatctaaaatatgcccgttagtgtattaagatcataactgcctaaagcttcctgtgccaggagtggtcttagctctcaaagaagtcatagtctggccaggcgtgatgactcatccctctcatctcagcactttgggaggcgaaaggattgcgtgaggccaggagtttgagaccagcccgggcaacatagcttgatcccgtttcttaaaaaatggaagtgatatccaggtggggaaaccttcctgctgtagtggagcctcttgagatggcacacgtattttgctcacaggtgctatcaatatatagctctggttcttcagaatataaataactatcacctgaccccaataccttatctatattgagattgttcattagatccaaaacatcttgtgcatttcttgctttttagtcatgcacagaccttgtctttactttcaaagacagtttggtactgaaaattgctctggtaaattaacacaatttatttaatccctgctctttccaatctttagcaacgtttttttcattgtcaccatcagatgaccttgctgagcttccaagtggcaattgcttttgttgtattgtttaaaggcaaacaaaaatcaattattattggctctagagtgcctggcgaggtggagctcagttctttgtgcattgcgcactatgctgctggtgtctcagctgccatgcttatggttgcattactttcctgtctagctttggtattcttgcctttaaaaatttctttttccatttgcttttcttagccagtgatgacagtaaaataaggaacgacctatttattgttttaagagatacgctggatggtgcccaggcagatgagcattgccattcaaggtggcttcttggtagactgcatttactcttaatcgggtgcctgtgggtcagtgcatttcttggtcatccttactctgtcaaagctgccttgttagccaggttactagccatactagtctcattaccttacgataacacctcattcaaatggccttaacgaagttgaacacttatcttagtcactatggttggctttgaaccttttctagaagttaagtttattccctgggaaaaaacgtgtttgccaccacacagagtgctgggtgtactgggaacccggcttcaaaggcaactactccagtagggaaggttgaggagggtattgaatgatagctcactgcttaaataagtgtttagagtcccaaggtatatgtaatggcatatgaaatgcctagtgtttaaagaatattcagaaataatcagtcatactctttaatattcatatctcatagagttagcatcaggaaggaaacttggtagattaaataaaatagcagaaattactgctggatttttgtacagtagaaatgtatgcacatttttctcccctagtagtcacttaagttgcatatccatttcctgttacatctcatgacatgttttgggtaaaccgtttttggaagcgtccatttgtgtagaagttaggtggttctgagtttaactttgtacacatttctaggcacaaggaaattaaataactggctgagtgagagtgatctcgttgaatgctgaggcttgtttgggaattgggtttattttggtgaaatgtaaatttagatccactctgtattagtttttttttttttttttttttttaacggagtctctctctttcacccaggctgaagtgcagtggcatgatctcagcttactgccaccatgccaggctaacttttgtatttttagtagagacggggtttcaaccatgttggccaggctggtcttgaacgcctgacctcgtgttccactcaccttggcctcccaaactgctaggattacaagcatgagccatcgcgcccggccaagtccgtttttacactcctataacgacatacatgagactgcgtaatttataaagaaaagaggtttaattggctcacgattctgcaggttgtacaggcttctgcttctggggaggcctcaggaaacttacagtcataagggaaggtgaagaggaagcaagcatgtcttacatggaagaatcaggaggaagaggggtggggtgccacatatttttaaataaccaagcacagactcactatcacgagagcaacactgaggggcaaaatccactcccatcatctcatctccttgtaccaggcccctcctacaacactggggattgcaattccacatgagatttgagttgggacacaaatctaaaccatataaccctcatacacatgtattgtaattcagaatttgtcattttaaaaaaaaatttttaagattagcttatcaatttaaatgtttccagccctgaactctcaaagtcaactttaatgagttttgatttttgccgagaaagatcaacagcagaagaaagagaagtataacaaaacttagctccacaggagcaaactggagaattggagtactggtttatgattttggtcagttaagcagaatgcagtcctagtttaaacaagactggataaaagtccaaattcaaataccattcttacaagtgtttgaatttaattttgtcagtgtacatacatatatctagtaccatagtgatctcaggctttgaagaatgaaaagcaaaagaaatgatttagagtcctggtccaaccactcagctatctgatatccttttgctattttcgtttaaggggttatcagggaatgagctaatttgacattttctgcttaaagcaatggttggggctgggttggggtggagagagctgctctgaggaggtggtgtggggggcctgcgaggacacacttgggttacctggtacatctgcagttcccatggaattgggtctcaaaactgagaaatggaagtgtgagctaggaagaggagtagcttaatggggactttgccacacttttagtgctcctgtagctgcacacatgttgttctttgtaatgtatgatttgtgtcccagtggaacacttgaggagtgggagctggagaaaggaatgttgtacagtgttgtgcagatgtgggtgagatgaggtgatctgggaagctggcagtcttagttggcccaggaatgccaggacctgagatgacagctgctggtggcagcggggaatgcaggtgtatctgtgtcgaggttgggaattggactttgaagggctgggacttccagaaggtaaaatgggattgcactgtttgggagaaggggtacagatttttttgtttgcttttgagataaggtctccctctgtcacccaggctggagtgcagctgtgtgatcatagctcattgcagcctcaacctcctaggctcaagcaatcctccttcctcagcctcctgagtagctgggactacagacatgtgccactacacccagtgaatttttttttcttaaagatgaggtattgctatgttgcccagactgatcttgaactcctagaattctttttttttttttttttgttttgttttgagacggagtctcgctctgttgcccaggctggagtgcagtggcatgatcttggctcattgcaaactccgcctcccaggttcaccccattctcctgcctcagcctcctgagcagctgagactacaggcgcctgccaccacgcctgactaattttttgtatttttagtagagacggggtttcaccatgttagccaggatggtcttgatctcctgaccttgtgatccacctgcctcggcctcccaaagtgctgggattacaggcatgagccaccgctcacagccgaactcctagaattcttaaacattaaggacagaaacatctctgttcttaatcatgatttgcttttagtctcagcagatggaaaaatgatttacttgcaaagtgagagagctagatgaggaaggaaagaatatgattttgtaccactcagagaaaaatgtgagcatttctctactgtcttgggttggttattttccgttgattcaaaattgctctgcaggagacataggagaggcttgagagatgtcagtgggtggccatggctcagccttgatcctgagtgggtgggaatactctgttaatggggcaaagtggaccctccaggtccttcatgctccttttggaaagaagcgttcctggccagacacagtggcttacgcctgtaatcccagcactttgggaggctgaggcaggcagatcatttgaggtcaggagttcaagatcagcctggccaacatggcaaaaccccgtctctactaaaaatataaaaattagctgggtgtgatgatgtgcacctgtagtcccagctacttcagagctgaggcacaagaatcgcttgaacctgggaggtggaggttgcagtgagccaagatcgtacccctgtgctccagcctgtgtgatagagtgagaatctgtctccaaaaaaaaaaaaaaaaaaaaaaataggaaagaaaatatatgttcccctgtggttccctgttataccctcttctcttgaatagtttatcagaagggacaaccagctcctcatgcccttcctcagcaagtgtcaacagtgtgggagtgcagttgataaagcttgattttcacaactctgcaagtagctgagctccaccagtgttagaactgaaattgaggttatctcaccaggaaccaactttcagatgttgaagccagtagaaatttagtaatgtgggaaactgataactaaaagtattccaggttctaattattttgtcagctcagttttaggaagcagtcctagggattcccctggaagaaagtttggctggatagagggcagtgattgtgaattttctagatcttttgtggactgcttctgttgttaaaaaagcagcagtctctcagcacacgaatgggaagtgttaatgctgtaactgagtaacactgatactgagtttaaaataatggtaaatatcccactgaaatttcacccccagtacagattagggccttggaatgctggatagtggattaaggacatctgaaaatctacttcataaaagcagtgagaacattggcaaaacctattaatttcaagtttttcagaaccatggaaattagttaaagatttctagcaatctgaggaatgattgttcaagaaaacactgggatctcagtaggaacagtgaaccttgtgttttaacctgctgcaatcccattcccggcccctgaccacctccttggtggccttgaaaaccagcagcctcacagccatggcagctgtgaaactcagaagtctgttaaaccactggaagggacagaacagaactggagctcttgaaggaccatcctcaaagaaatgtcacaattcgaccatttggcagcttgcttgaaagggcctttctgagggctttgtctttgtttcacccaacacaggtcagctcacattgtgcaaacagctctacctgctgagcatttgttgaaaacaatcggtggtagttgtttaatcacagctgtctgaggtggtgttgctaattgaggccaagtggctgaccaaaaaattttttatttttattttatttatttatttatttatttttttgagacagggtctctctctgtcacctagcctggagtgcagtggtgtaatcgtgactcactgcagcctcaacctcctgaatttaagtgattggtcctcccacctcagcttcccaagtaggtgggaacacagatatgtgccaccatgcccagctaatcttttaattttttttgtagagatggagtctccctatgttacccaggctcaaacagtttttttaaaatggagaagtaaatgttccttgacgacttcaaaaagctccaacatattcctgggaatctagaaggctctgagcattctgagaaggctctaccttctctgctgtggcgatcttgaggctttatgcaagcctcaaggaagactaaggtagaattataaaccattcagcagagtgttgaaggcatgccccaatacccacacccacacgccctctcacctacccacccacccacccttagtaaaggctggaaaatttattaattcaaggcatgtaaggaaatctctgtgtagttactagcgaaccactaaactaagagtcttcagtggccatacatggcaaacaaaaaacaaaacaaacagactttatagaattagttcctgaaaatcactaatcagatagcaacaaaacaaaccctgggatgggggaagaatttgatttttagaattgacacattgtattagataaaatttctagtctttgacaaaaattagaagctatctcaagaaacaggaagatatgtcccatatacaggttaaaaaaacacacacacacacacacctcggtttctgcctagtttctaggatagaaactgtccttgatgaagcgcagatgttgggcatacttaaaacttaagtcactatgaaagttatgttcaaataactataggaaagcatgtctaaagaatcacatgaaaatatgcttgtgaggttgaagccaggaggattgcttgagcccaggagtttgaggctgcagtgagccatggtcatgatcaggccactgtactccagtctgggtgacagagcaagactctgcctcttaaaaaaaatattgggtgaccaaacagagaatgggaataaagaagtagagattataaaaaaaagaaccaatagaaattctggagtcataaactctagtaactgaaatgaagaattcactggaggggcttagcaggtatgaactggcagaagaatcagtgaactggaagacaggtcatttgagatagttcagtctgaacagcaaaaataaaagaatagaaaaatgaacaaagccttagagacctgtgtaacatcatcaaccatacccataatgggagtcccagaagagggaagatgtaaagggaaaaagaaggtatactgtgaatagttgtgtgtttgttctcatgccgctaataaagacatacctgggactgagtaatttataaaggaaagaggtttaattgacttacagttccacatggctggggaggcctcacaatcatggcagaaggcgaatgaggtgcaaagtcatgtcttacatggcaccaggcaagaataggagttgtgccggggaactcccatttataaaaccatcagatctcatgagacttattcagtaccatgagaacagtatgggagaaacttcccttatgattcagttatctccaccttatcctgcccttgacatgtggggattacaattcaaggtgagatttgggtggggacacagagccaaaccatatcaagttgtatgccaacaaattaggtaacctaaatggaatttatacaaattcatgtagatgcaaatggccataactgactaaagaatttgaaaatctgaataggccaataacaggtaaagagattgaaatagcaatcaggaaaccttccaccaaaaaatactgggtcacatggtttactgggtaaattcactgggtgaattctaccgagtattattataaactctttcaaaattttataattaacctgataccaaactaaagacatcacaagaaaactatggaacaatatcccttataaatacagaggccaaaatcctcagtgcaatgctagctttcctcccattctcactacttgtattctgtcataaaaaaaggattgtacaccgtgacaaagtggaatttatcccaggaacaaaaacttggttcaccataccaaaaccactcaatgtaatctgtcatgttaatagaataaaagacaaaaaccacatgatcatctcagtaaatgcaggaaaatcatttgataatattcagtactttttcttgatgaaaactatcaactagtaatagaaggaaaattctacaatttgataaagactgtctatgaaaaactcacagttaacatcatacttcatggtgagaaattgcatgctttctcctaagattatgagtgagacaaggatagtcattctcaccacttctatgtagcattgtactggagattctatctaggacaattagtaaaaataaaatagtaatataaataaaagcattgagattgtaatggagattggaatagaactataactagaaaagtatctgtagttacagttgacatgatcttgtatatagaaaatcctaaggcgcgcgcgcgcgcgcacacacacacacacacacacacacacacacacaaatcttgaactaataattgagtttacaagcttgtacatacaagaacattgaagcatccagaaatgaaattaataaaacaattccatgatacagtagtatcaaaaagaataaaatacttgggaataagtttaataagtttatgatttgtacacaaactataaaacattcttgaaggaaagtaaagaagacctaaaaaacaaaagaaaggacattccatgttcacggattagaagacttacattgttaatacggccaatactccccagattgagctgcagatggagtgcaatacctacaaaatcccagctggcttttttttttctcagaaattaacaagtttattttaaaaatcacatggaaatgtaagggacccagaataaccaaaacaaccttgaaaaagaacaaagctggaagactcacacttctcaatttcaaagctttgctacaaatctacagttatcaagacagtgtggtactactgtgtggacagccatagagatccatggaattgaattgagagtccagaaatagacccttaactttacagtcagttgtgtttttgacaggggtgttaggacatgaatggataaagaagatgtggtatatccatacaatgggatattattcagccattaaaccactaagctcagataaatgcatggatgaaccttgaaaacgtatggtaggtgaaagaagtcagacacaaaaggccacacgtttatttgaaaattctggaataagcaaattcagagacaagaaatagatgagtgttaatatgtgctggaggctggtgggaggggagaatagggtgtgatggtagtgggtatagagtttcctttgggatgatgaaattttctgtgattagctaatggtgatagatgcatagttttggagacacattaaaatcaatgaattatacatttgagaggggcagactttatggtatatgaaatctcaataaaacgtatttaaaaacaatatacagttaagagcgcatccagatacacctaaggtattagtaaagcggtgcattaagctgaaatatctggcttgtgcaaacttggggcatttgtaccttatgtagaattccaaaatctgcttaggattttccctgtccactggactgccactggcagggtctgcttccctgttcctgggttgagggagcagcattggagcatccctcaattcctgaatgaggaagttagttaaaagggcaatgtgagctgtagggccacactcatctaacaggtgagcttaagtttccattgatggcagacctatcagatgtttcctcccattctcactacttgtattctgtcattttgctcttatcctcccaaaatcatgctaagattttttttttttttttaagacagagtctcactctgtcccaggttggagtgcagtgatgccatctcggctcactgcaacctctgcctcccgggttcaagcaattctcctgcctcagcttcctgagtagctgggattacagttgcgtgccaccatgcctggctaattttttgtattttttttttttttttttttaatagagttggggtttcaccatgtgagccaggatagtctccatctcctgaccttgtgatccgctcacctcggcctcccaaagtgctgggattacaggcgtgaggcagtgtgtctggccactaagaatttttaaaataagtgacacaatgaagaacaaggccatagagatgatcttgggtaatttgagggtatcaaaaagtatctgcctgatggatggcttgagacactaaaaatgagtaaatgattacaaagtaaggaatgataatttgttttgaagaataaaacagattcttgtctctggtggttgagggatacgactgatgctgtatattaagacaagaagatgaagcccaaatggcagggaaattgaagagaagatacaggggtatctaggcacagggttggctgtgaaagtttcaatatgtaaaagatgataggctgaaaggaagaggatggtggaaaatacaaaagaggcattgataattcaggagtgtggagtgtgagagaagcttctccataggtgaagagttggatggacagtggttgttaggtcaaaataacaataataataacctagcacatatgtcagatatctgtttgggttcatcttacgcaccattctcttgggagggagcatgctttgaacagatccaatttatgatggagttttaggaccagaaagcgtcgtagtagcagagacttctcgtcctagagagcaaaggggaagtcattttttagttagttagtttgtgttttagacagtcttgctctgtcgccttcgcctcctggatgttcaaacagttctcccgcctcagcctcctgagtagctgggattacaggcgcacaccaccatgcccgactactttttctacttttttagtaaagatggggtttctccatgttgtccaggctggtctcgaactcctgaccttgtgatccaccctcctcagccccacaaagtactgggattacaggcgtgagccaccgcatccagccttagtttgtttctgagatagagttttgctcgtttcatcacccaagctggagtgcagtggtgtgatcatagctcactgcatcctcaaacttgtggggtcaagggatcccctcacttcagcatcccaaaatgctgggattacaggtgtgagccactgcatctagctgggaagtacttttaagagtatttttttcaggctgggtgtggcgcctcatgattgtaatccaagaggtttggaaggctgaggcgggagggtcacttgagaaaaggagttcgagaccagcctgggctaacatagcaagacccccatccctacaaaattttttttttaaattagctggtggtggtggtgtgcactggtagtcccagctactcgggagtgaggcaggaagattgcttgaatccaggaaattgaggctgcagtgaaccatgattgcaccacggcactccagcgtgagtgacagggcgagacccctccagatgatagctggagatcatgttattttcttactgattttcccccggtttagcaatacaaagtgatcgttaggttggcacaaagcacgatggaaaataaccattgttggcatcaagagaaatctcacaccacttgataaatatagtgaactagattactaaagagtgatttccctggattgcttgaaccagggctcagtgaaaatgttgctgtttgctttttttgtggtcaggattttttgattaaatgagaagcctacaaatatgcaagctagaaggtgttgtattttgggattaagccagactgtagcaggatgttagtaatttgagttgcataaactaatctggggaggcagagtgagtagctgatgtcacatgaagagcaaacccttgattccattcgtaatacataatagaacaccttcgtttctaaaactgggtgcagtaaagcataaaaaaacctttagtagctgatgaaagattctgccccaggcttgagtctattaaccagaaaaactgaaacaaaattaggcaaggtggtaagttttgctttcttttagtggaatattaggatatacagcaaatggtagcaggaccacgttgggaaaagggccaaaagactttttaaaaatcctgtttgaggtttggatccattttctttcatttttggacatacctttgagtagtgggtaaactgagagctcagtgaggtgagcctgtgtctttcagcgggcgggcgggctggagttggaactcctgtttcagtggttttcagatcctgctgatctccagaatggctccagttcccccacccctaatgctttattatgaaaaatttcaagcctgcagaaaaggtaaagaatgtacagtgagcacccatataccaaccacatggattctgcaatgaacattttaatatacctgcttttttttttttttttttgagatggagtcttgctgtgtcacccaggctggagtgcagtggtatgatctcagctcactgcaaccactgcctcctggattcaagcaattcttctgcctcagccttctgagtagctgggactacaggtgcgcgccactatacccggctaattttttgtatttttagtagagatggggttttgctaacaggccagtctggtcttgaactcctgacctcaggtaatctgcccgcctcagcctcccaaagtgctgggattacaggcgtgagccaccatacccagcctcataacggctttttttttttttttttttttttttttttttgagacagggtcccactttgtcactcagtttggagtgcagtggtgtgatctctgcagccttgacctcctggactcaagtgatcctctggcctcagcttcctgagtagctggagctacaggcatgtactaccatgcccagctaatttttgtattttttatagagataggcttttgccatgttgcccaggctggcctggaattcctgagttcaagcaatctacccacctcggcctcccaaagtactggaatctctttttttggaatacgtttcaaagcatgtgatagacatcggtacagtacagtcctaaacactgagtgtgcacgtcgttaactacagtttaatatttgttttgtttctggatcttttccagggatttttttcaagattaaattccaagcgccatgatagtttctgagttagaaggatggggcaggcccaggaatcagtactttgaaaagctcccaagtgcttcttgtgatgcatcgggtttgggatcttctgccccagggagcgcttcccgattacttcatagctaatcctcacctaaaatgcagaggtgggcagttatctttaacctgaccatagagctccatttttggttttcttggaatcttttgtttaaaacagtggttctcaaccaggggcagttttgtgcctcgagagacattggacaatgtctgggatggtttggttatcacaccagggggcatctagtgatgagagatcagggatgctgccgagcatcctgtaatgcaccggacagccccacaggatggggagttatctggaccaaaatgccaatagtgctgaggctgagaaacgtatttttttttttttttttgcctaaaagaaaattgcttgctccagatgactccagacaaaccaaaataaaaataaaaagtaaaaactaaaatgacaacatgaaatgaatttttaagagccaaatgagacctttagagacaatctcatcactgcctacctggtttccgtcaaatacagatttatgctccagaaagtacctaatttattaaaataagctgatttctaaaagcttgttagatggtcagtaatctcaaactttgagtgaatttacttgaaaaggtaatgttgctggtggcctttagtttcttttaatatatcttaaatatgatatcaaagaaaaacagaacatgatgctttgggatgaatgtaatgaatgaaaagcaggattctttggcaggtaactgtgtcccaggccctgtcctgcagggtggcagggatgtgctgagctgggtgaggggggaccgctgagggcttctctcagtagttgctctgtgtagaattttctgagtgtcttgggagaatgggggcatttttcctgaaggtctcacttgactccacagtgaatggctttacctgtctcttgagtaagatgcatttctagtaatgctctgactacttagtccacgtttgactagtttttaggaaaacaatatgtacaatggaacagaaagcttacagaaataaagggcagttcttttcttgaggtgaaagtgatgtggggagccagtaggtgacaggatttgctctggcccctccgagggaggaggaagatgaaggtgaaacgtggtattggtcagtccgtttcctgcttggttgatttcagggacctgatgagacaatatggtggtgaaaacagactgctggattgcaatgggcggaactgggcttagtctctggataggtgtcagttcatttcacacctgtcattgagggaaaataatacctgtatggctgttggaagattaaatgagactatgaacgggagctgtgtggataaaatgtaccaggcactcccagtgccagaaggtgttcttgttagttctgggtgtggcgatgtgcgaagacacccgtgtctgcggggtgtgtgtgagctgcagataaccagcaggtcctgctgatgaggcaaccttcttgggagtcttggctcagttccggggtttaattacgatgtatccttgggcaagtggcttaatgtctctgattgtaatttccttcattttttcatatctaaaatgaaagaggtgcttggatattcctaagggttcatctttaggagtctgtacttctggtgtggagctttctggaaaaaggcttctgggaatctgaaatggcagtagtgatgggcgtggtaacagcagtgttcatacgcttcctcagtaattttatgtaacaaacactcacagtgtacttactgcccctgagatcttaaaaactctcactttcaactttcacgacaccctataacttaggtaactgctattatccctggtatacagatggggaaactgagcctcagagaggttggtgatttgccccaagtcatagctgggaagtggcagacctcgatgggatgcaggcaccctgccctctgggctccgatcacttggccacctccccgcatgcaccacatgggctgtggagttggaggcatttgtgggcttcaagaatgagagttggtggggagtatgtgtgaggaaccggaggggtcatttccctgggactgggattgtggaggttttgattttgcttttccctttttaaactgggtgaggtatgagcatgggaactctgtacggaatgtgtcattggagagggacagcagggacaatgaaggtagtccccagagaagtatgagaaactggcattcagtgctcatgcagaattctctttgttttaataataatacaaataataacattaatattatttttagaggcagagcctcactctgttgcccaggctggggggcagtggcacgatcatggctcactgtagccttgaactcctgggctcgagccatcctctcacctccctcagcctcctgagtagttgccatgcgtaacaccgtgccttgctaagttttaaattttttgtagagaccgggtctcactgtcttgcccaggctggtctcgaactcctggcctcaagcagtcctccaccacagcctcccagagtgctgggattaaaggtgtgagccactgcaccctgcctaggattctctgtagatggggagcccacctgggtgagatgccagacacctggctccggcatatgcacagcagtttcacacgagcgtctcttactcaggtttcagagttctggtaaaagatttaggtttgacatccaccctttgaggtttttggttctcacatgtttgataacctgaagcttgtgggtttgatatgggcagtaaagtgggattatttctgttagagatccttattccctagagactttctggtctggaaaggtgagaggctatatattcattagctggaaccaccatgtggatcatttgttggaagaactgttaggaagaagacagatattgctatagagagcagggccagatgagcgagaaggcaaatgtacttcattcctgtacctgcaggcttattagggacagatgccctcaggcggggatgtgtagcttcacttgactgctctaaataaggagcgagagggtggtgtgtgtgttaaccatcaagattaagcaagcaagaaaaagacaaaagaaagccatcatttagtaactggtggagtgagttggagcctgggagctgccccaggacaactgttatttcccttgatcttcctcaaaccctaccaggaagtgagggcaacagttccctaaagcagccccatcaagctcttaagaaagcagtttcactgggagtggggagaggtagaattgggaggtggtagagggctggggggtatgaaatgtgagggccggagtcctcagcatcggaactccagaaataaaaagttgtctgggtctttgaaagcctcctatatgataatgttacagtaacagtgttctctgctactttcaatgaataaaaaacctagggtttctcagctacagtgtgcattaagagacatttgtggtctagttttggcacttcatttctatttgggaacatgcattctgagttttagacaactagcttccaaatgaaattttggaacaccaccctttttttttttttttttttttgagatggagtcacgctctgtcgtctgggctggagtgcagtggcgcgatctcggctcactgcaagctctgcctcctgggttcacgccatgctcctgcctcagcctcccgtgtagctgggactacaggtgcctaccaccgcgcccggctaattttttatatttttagtagagacggggtttcaccgtgttagccaggaaggtctcgatctcctgacctcctgatccacccgccttggcctcccaaagtgctacgattacaggtgtgagccaccgcacccagctggaacaccacccattttttaaagcagagaatttattgttatttgcacaaaaggacgtttgaacactttaggaaatctggatgctggaattaactcggtcaaaacaaagcaaaacacacagaatctcgtatcttttcctgccctgatgctgaactgcagccttgatttatgttttgtttttccacttttgtttctgaacctatgtggtacaggctgaacccttgtccctgcttcggagcacttaccttaattattatagaaaaaaattaagagttggctgactctgtgctgaactttctggtttttttccaggcagtttctccataacaaatgcgttttgcatagaattgaaattgcctatttacctcaatgacaccatcctaatagttggtggtaactacctaatctaataatctctcattgtgtgtgatagggctatttattgtattttagagtgaaataatgcattttgtttgcattttaaaaaggaatggtacaggaaatgattgtaatccaggactaaatatacagtttgcagtctttttattctaattgctttctgatgaatatatatatatatatatatatatttttttttttttttttttcttgagatggagtcttgctcttgtcgcccagactggagtgcaatggcatgatctcagctcacttcaacccctgcctcccgggttcaagcaattctcctgcctcagcctcccaagtagctgggattacaggagcctgccacaacgcccggctaatttttgtatttttagtagagacggggtttcaccatgttggccaggctgggctcgaacttctgacctcgtgatccacccgcctctgcctcccaaagtgctgggattacaggccttctaataaatattattttacacatcgagatagtactgtttatgcattttgtatgctgcctcttaaatctataagcattttcttttcttaaaaaaaagctttgggctgggtgcattggctcatgcctgtaatcccagcactttggggggctgaggcaggtggatcacctgcggtcaggagttcaagaccagcccggccaacatggtgaaaccccgtctctgctaagaacacaaaaattagtcgggcatggtggtgcatacatgtagtcccatctacttgagcgtctgaggcaggagaattgcttgaacctgggaagcggaggttgcagtgagtggaggttgcagtgagctgagatcacaccactgcactctggcctgggtgacaagagcaagactccatctcaaaaaaaaaaaaaaaaagctttgataaatattgtacatgattgcaaagcgtcccatcgtgtggatgttcacttagttatttgatacatatttttgtgttcttgggctgtttctaatatttctgtattacaaataaggtgatgggaagcagtttcattcatcaatcattctttttaaatgtcccttcctatcagtttctgttaatcagtcaaaagcgtatacattcttagcaggaacttaaattcttagtaggaatcttaacaggttaagatttctaagggtagagagggtacctgttttgttaaccggtggcttaataccatttaataccagtaaaggctcaataaatgtttattgactgaatgaacagaaaagatcagtgatcatgaagaatggcccagttagtggtatatatacgagaagtgctgcagtggttcacagtaacatgataataactaattgtgtaatgatttggcacgaggtactgatctaaatgatttatacattgttgcatgggattttggaaggggagggagtatacctctaaattagttcatgctatgggatggaagtaagactttaaatttaggtgggctcaaaaaacagaaacaaaccaggggccgggtgcggtggctcacgcctgtaatcccagcactttgggagtctgaagcgggtggatcacgaggtcaggagatcgagaccatcctggctaacacagtgaaaccctgtctctactaaaaatacaaaaaaattagccgggcgtggtggcgggtgcctgtagttccagctactcaggaggctgaggcaggagaatggcatgaactcgggaggcagagcttgcagtcagcagaggttgcaccactgcactccagcctgggcgacagagcgagactccatctcaaaaaacaaaaaaaacaaaacaacaacaacagaaaaaaatcaaatgttcgtcagctgatgagtggataaacaaaatgtggtatatccatacaatgaatgctatgctatgctgccataaaatggagtgaaacattcatacatgttgcaatatggatgaacctgccactcaagtagctggtactacaggcatgttccaccatgcctggctaatttttgtattcttagtagagacagggtttcaccatgttggccggcctggtcttgaactcctgacctcaggtgatccacctgcctcagcccctcaaagtgctgggattacaggcgtgagccagtgcgcccggcccaaagcttttttttaagaaaagaaaatgcttatagatttaagaggcagcatacaaaatgcataaacctggaaaacattatgggaactgaacgaatccaggcacaaaagaccacatattgtgtgattccacatattccacatattgtgtgattatatggaatgtttggaacaggcaaatccacagagacggaaagtagattagtggtggcatagggctggaagaggaaggaaacaaggactaactgctaatgggtacaggattttttttcctcaagtgatgaaatattcttagattatgaggatgcttgtacgactctgtggatatactcaaaacgatttaattgtatactctaaatgggtaaattgtgtataaattatgtctaaataaaaccatgaaaaattggatgaggtttagcattgtagaaggaaagatgggggtggtggtgtgttagtttttgagggctgccatagcaaaacaccacacactgggtggcttaaacagtaaccatttattttctcacagttctggaggctagaagtccaaaatcaagatgtcagcaggtttggttttccctgaagcctctctccttggcttgcagatggccacctggccaccttctcactatatcttgtggggtttttgtgtgtgtgtgtgtgtgtgtgtgtgtgtgtgtgtgtgtttgagacagggtcttcctctgtcacctaggctggaatgcagtggtatgatcatggctcattgcagcctcaacttcctgggctcaagagatcctcccaccccagcctccagagtagctgggactacaggtgtgtgccgcaatgcccagctaagtttcgtaattttggtagagactgggtcttcctatgttgcccagcctggtcttgaattcctgggctcaagtgatcctcccacctcagccccccaacatgctaggattgcaggtgtgagccactgcgcccagcctggtcttgtctttgggcacaaatatccgctagtgtctcattgcgtgtccacatttcctcatcagctctactggattagagcccagcgtaatggcctcattttaacttaatcacttctttaaagtcccagtctccaaatacagtcccattctgaggtagtgaaggttaaggctccaatgtgaattctgggggaacatggttcaacccaatgagaacaatggttatctgttgggagtgaggactgatatgagtggagatgcatcggtaaagatgcgcggaccacagatgtgacgcagcaggtgtgcacagaggtatgggatggggtcagtgtggagggccgtgtgccaggcagcagtgtggacttggtcctctacccagcgtaggggggtcattctgggggctgaaccgagggtgacactgtaaaaccatgcttcaggaaaattcatctctgcgccctggaggatggactgaggagggaagaggctgagggaaatgagtgtgcaagataatgaggcgatcccaagggaagtaaaaggattggaggccttgcaaaagcaaagcgaacccaagcttcagaacggaggcatctgagatgatgtcacagttttgaaccttatttatagaagaaagagggtgaaatggggaattaggtaaatgaaaatataggtcccattgttggtaagatacatggagtgtcattgattcagtatttagtgtgcttttccttattttaaacagctttcatagctcacttccaaactgtatttttgcaaccaactctttttctctctctattaaaaggagaatcttttattttacactaattaacagctgattctcctaagagagttttcaggaacctaaacctcagagttagatggagacaagtgtctttgttaatcatttatgtgaggtcagattgtacaatttgtaacagattttacagctggttcctttattaagggatgggtaggattcctactaattattattttgagttttactttgtttttaaccattgaaacttgggggatgtactctttggtttgggtagattttgcttatagatattgaagtttgagttgttgaatttcatacatattttattttgacttttaatcctttaaaacatttgactctgactccattgagctctgtagaacatctgtcatccagatcttttgccagaatatagagccttgattggacaccttgccagctaatttaaagcttcccaagatgcagaatactgtgtaaaatgtcctacctgttgtgtcagaagggagaaaataagacgagattttcatatttgcttgtagatccataagaaacttgggaagaattcctaagaaactagcagtagtggttccctgcagggtgggggctctggatgtgggtgtggcaggggatgggagagactggcaggttgaggagcagggtgagagggatgtttttatgatgtacattctcatatatttattttgaactatttgaatgtattactcatgtaggaagacaaacctttactttccaaaaatattagggaaaaactttcaagtctctcatttttagcctttttgttgttctgatatttccacacaggacagacggtaacatgcccgatacattttaagtacaaacaaggctgtaagttgccttacttgactttcttcactattttctattcaaaaaagtatttttgaatccaagggaattagaggaataatcttgaaatgattatgttttgggggaaaagtatattattaatatgatagttatctaatgttgtgtaacaaattgcctccaaatttagcatatgaaaacaataagcattcattgtgtcacacattcattctttcttttcagtgaaagttaacctgtttccatctgaatagatttctcactctgtatcctgccagtaatcattttgtactgtttctgtgcctttcaatccaagagtccaacctgatgaggttctgctggtgtaattcttttaaaagcattgtggatgtcctgtgaatctcactggagttcactttttaaacattagacttctgtggagactgctgaaggacaacacccttacttcttagggcctttggtttgccagaattgttctctgagccattgccttggattttttcctgacttcttaacaaaggattttataggtgggaccttcaacactctggaaattgccttagctacattcagccatctccttaggtacattttccatctcccacattgtagcaggcaatggcgttgctaaactttccatcaggaaataacaaagatctccttttccagtttccagtaacattttcctctctacaccatcatccacagtctcctgaaaggccctccaggttctagcttttccagggctcttcaggggttttcgaactctctttttacagtctttccagttcctgcccattgccacgttccaaagtcactcacacattttaggaatttttctttttttctttttagcaagcataccaattccagttaccagaatctgttagtttttgttatgtgttgccgcagtacagattgcctcaaagcttagtggctgaaaacaaggaacattactggccaggcacagtggctcatgcctgtaatcccagcactttgagaggccgaggcgggcggatcacctgaggttgggagtttgagaccatcctgaccaacatggagaaaccccatctctactaaaaatacaaaattagctgggtgtggtggtgcatgcctgtaatcccagctactcgggaggctgaggcaggagaatctcttgaacctgggaggcggaggttacggtgagctgagatcgcaccattgcactccagcctggacagcaagagtgaaactccatctcaaaacaaacaaaccaaacaaaaatgaacatttactgccatacacacttcctgggggtcagggatcccagagtgtctccgctgtgtcagtatgtctcagggtttcctgaggctgcagtcattatgcccgctagggcttgggtgggactgaagcacctgcttccaagttgcctcactcacatacctggcaagttggtgccgttgctggcaggaagcctgcttttcttgccaggtggacttctctgaggggtgcgtgaatgccttcactacagggcagctgacttccctcaggacacatgattcaggagaccaggggaaagctgcagtgtcattttatcacataatcccagaagtaacactctgtcatttctgcaatatcctgtgggttacacgtcagcattattcattgtgagaggtgactacatgagggtgagtccaggaggcaagaattattgggggctatcatggaggtttgataacataattggtaagaaattcagatacacctcagacttgattgtggcataccagtgtgttgtaaaacttgtgagaatggcttgccttagaaagacaagtagtccatccagtgtcttattcttatgttaagttgggattgctattttgttacccttgggcctctatatacaaagcctctcatagtaatagatctaattgggttgaagtttagtattatgtatatgccctctgcttttattagtagattttactttcgtgaaaggaacatataaacttcattattgcatttttgtataaatgcagctggggacatggttttattacccaatgtccattttgtaaatatttagagaactttttttttgcatcataaatcagtataaatagaagcttggtttccattgttgccctggctatgaggaagctgagagtgaaatttgtcgttcaagtgtggcagttatgttactgactggcgtatttatattctcctttatttgatattttgctatgagatgttccagtttacttgtgggaaaaaaagccaggtgttcttgaactcaacaaatatttattgaattccacttgctggccagacagcattccatgtgccccagatatggcactggacagatagataaggtccccactcgcctacagcttccaacctggtcgtaagaaaataccttagcttttgctccataatgtggaagaattggcctcagagaaaacctaattcatatgtaccacgtttctacccattcaagttttatttcataatttttttttttttttttttttttttgagatggagtcttgctctgtcacccaggctggagtacagtggcacaatctcagttcagtgcaacctttgcctcctgggttcaagcgattctcctgcctcagcctcccgagtaggtgggattacaggtgcatgccaccatgcctgactaatcttttgtatttttagtagagatgggctttcaccatattggccagcctggtcttgaactcctgacctcaggtgatccacctgcctcagacttccaaagagctgggattacaggcgtgaaccacgatgcctggccgtatttcataattctatctttccatagaaagaattggctggggcacgtataactaatgtgagttactgatttcagaggaagcttttggaagtggttgataggcactgaatgggatggggtggtgagtggtttaaaataacacttgaacctttggattcaaatggttttaaatgcatctcagaaaagtgaaaggtgaatgggagagctacatccattgagagcaagggttcatcagctagggctgtggcttaaactaagcagatattctttcctggcagttctacaggccagaagcctaagatcaaggcgtcatgagggttggtttctctgaggctcccagacagtcatcttctccctgtgtcttcacggggtctttattctgtgtctgtgtccaaacttccttttccttttttttttttttttgagacagagtcttactctgtttcccaggctggagtgcagtggcactatctcagctcactgcaacctccatctcccaagctcaagtgactctcctgcctcagcctcctgagtagctgggattacaggtatgtgccaccacgcccggctaatttttgtaattttagtagagacggggtttcaccatgttggtcaggctggtctcgaactcctgacctcgtgatctgctcacctcgtcctcccaaagtgctgggattaccggcataagccaccatgcccagcccaaacttccttttcttagagggtgggctttatctgtggttcttagttagcctcaccttcattcttccttttggtgttacggtcttgcttactgctttgggaatggatttgttgaaactacatgtgactagtttagggacccagtaggaggttttactataagtgtaaattaacatgtgcctttgggggaccttaaaagtttttgtcattgggccatgagatctgagtgcagctggtagaacctccttgttttctttggtatgagaactcctgggcttttgttggttccttccgttttctccggtgtattaccatttcacatcacagtgatattatccagataacacccatgatttgtttttaacggagtttcactctgttgcccaggctggaatgcagcggtgcgatcttggctcactgcaaccttcacctcctggttcaagcgattctcctgcctcagcctcccaaatagctgggactgcaggtgtgcaccaccacgcctggctaatttttgtatttttagtagaggcggggattcgccatgttggccagactggacttgaattcctgacctcaattgatccacccaccttggcctcccaaagtgctgggattacaggcacgagccaatgcacctggccacacctgtgatttattttatttcatttgagatttcagactttgtcgcttgttctttctgtagaagttttttcatagaagtatgttgtttcaaaagcaaccttcaaatagtagacttagcttggatgagaatctaaaagtctttgagtccaacaaccaagcaggtcccctgtccaggaagtaccttatagctgatgtttgagtatccctgcagatgggaactcactacctcctgaagcaccttacttctacccttggaatagtaacagagattaaaatgtccttccttaatttgaggtgaaatctgccttcttgtccattttacacacactaaccttccttccaccatgcaagctgagagagagccaggttgagcctgtgtttccacaacaactcttctcagacctcctgctgccacctaccatgcacttgctcttcactggctaggttccagttgctctgtacctttcctaaagtgtggtgaccagaatttggcacagtgagggaaggttccagagccctttagtgttatcgggggcacagagcttgggctttggagtcgctcagatcttgagttgatatgcacttctttgtccttgagcaaatgattgaaccttcttggactctcagttcctcattaataaaatgaagatgaaacaagatgagatggactgtgcacatttcctgatgggggctggtatgtgctggtgcccagtgcaaagtggctgctggcagaatggtgagtcaccagtacctgctcccttcactgagtgcttcctgtgtgcctggcaccattgctcagggctttacatggacttactcatttcattttcactgcagcctagagcgtaagtaagtatttgctttatccccatcttatagatgaggcatttgattctcaaaaaggtttcatagcttgcccatgttctagcagctagtaaaaggagaagccagagttttcatttaggtgggagtcctcaacctgctttcttaactgctgtgatctgcactgtggcatgagagtttgtcttaatgtaaatgcacatgtaatagcattattcacattgcctgagactgtggaagctcctttggcaaccagatgccacaggggactcatttcatgcttttagaagacttgagccactacatgccctgggaactgtgttgcttccccactggccatcactcttgcttttgtaagggatgtcacattgagccattaagtgtcatctctggaactcatgactctgttattccacatattaggttttctttgtagctttgtgtcaactccaagccaggtaaataaatcttggaagaaccaagttacagatgtgagtaaaagaggggatggcagggggcagaagtcagggcaggccctgtgacttgccaccagcatcctcccttcgggggaggtcctttcatctgggtgctagctggaggaattggcaacgtcggagataaaggtgtagatgcaccagctgaacgtcttgctctgtttcccattttacgtataagatgggtgatggcatgctgcattcagatccccatgggtgtatttgggatttggggtgggggattgtgtgtagaaggcaggaaagattgcccagcaactctcatttgaattgagggtggaagcggttctcgggcacagtatgccaaggcccagggcgtccaagggacagagcagagatcacagatgctgaacgggtggggaaggagcactaggcagggcatttctgatgagactttgatttgggaggtacgaaagttgtatgaggaatcttgataaactgcttagagtgaatggagatgagtaggaatcaccaccattcacatactggctctgcaagccactcagcacagctctgcacctgctcttatggaggagaagacaagcagaagagaatgttctgatctagaagagttcgtgtaagagcatgaaggcaacagcacttgagatgtggtgcacatgagcaaaatttcagtttatgtggaatttaagattaacagattaaaaggtaaaattctctccctggtaccaaaaaaaaaaaaaaaatccatgtactccctctctctcttttttttttgtttttttttttggagatggagtctcgctctgtcccccaggctggagtgcagtggcatgatctcggctcactgcaagctccgcctcccaagttcacgccattctcctgcctcagccttccgagtagctgggactacaggtgcccgccaccacacctggctaatttttttttgtatttttagtagggacggagtattccctctcttgactgatgtttcagcagtatgtggacagattcttttttaaggtaaatgaccaggggcttgtaatatgagtgtcacttaggcaacaggacatttcaatgaaatggtgatggaaataggttctttttgtagattgtgagctcttgggagcatggattttgctaaatatactgatttttaaatttttttgacatctagcatggtgcatttcacataggagtttttcaagaagtactcatttcacaggcatcttgaatgatagatgtttggtaagaactgcgcaagacagtgtactaatcactcattctcattcagcctctcaagctatcatggttggttagtaataacatttcaaaattatatttgtcccttaggctagcagagaatactgtttaacaggtttttcttgaaaagtaggagtagcgagctagagttgtctctaggtggggtaaataaaacatctcccaccccacccaaattgaagctgaataccttcaattcactactgtgcgcatattcatgtttcatgctgagcagttcacttgagactttctcacggaaagaagtgcgatacagttggtggtagtcttatatttgctacgtgctcatgtgttgtctgatgatagaatgcagtggtcaaatattgcacaatttacgccagaggaggagaattcccatcaactctccaaccatcataaatactttattccacacaataaggaaattgaacttttcagaagaatgatatagaacatctaaaataggttaaacttggaggaattatactgtccattgtaaaattggagccactcttgaaaaattgctgcatgccccactgaatgctagagcaagacatgcagtcccagctccaggggcttccagagtgattgaggcagggctgtgggctgctttcctgaagcctgactcctttctttcctcattacactgccacagatggtggcagatacagcatggattggcataagtcactctctactacctgcagaataaaggcccaatttcctagtgcagcttgcaaagtccttctcatctgccaccttcctgcctttgtgatttctcctcctgggactcctgcacccccttttttttttttaatttttcttttcttttttttgagatagggtctccatctgttgcccaggctggagtgtggtggcgcgatcatagcttattgcaggcttgacctcctgggctcatatgatcctcttgccacagcctcccagatagctgggaccacaggcacatgccaccccgcctggctaattttttgtatttttttatagagacgggatttctccatgttgcccaggctggtctcgagctcccgggctcaagcgatctgcccgcctcagcctcctacagtgttgggattacagacgtgagccactgcacccagccactcctgcacccttaccttttcgccgccctggccggctggacgactgcacccatttcacccggcattcttgtgcctgactgtgctctggccatttcctgtgtctggaatacccccattctcccatgctcagccccgtggactgtgtttattcgtaatcacacctcagagcccttccccttctccatggactccacccctgctgtgtagatggccccaacatcattttgctgagtggagtgccactgcaaggcatggcatggaggagcctgactgcataggtggcggcaccttgagggccttacagacctggcagttgaaggtatgggctagaagacagatgattccaaattacggctaagaaataggtaggctgtaaggcttgattgccgtgaatgcctctagaaagagcacttaaaaaaaaaaaaaaaaaagaagggatttccctgttcatggcctatgagtttaaaaacaagcaccccatgtcattagccctttgctcaccacagagttgctgacacattagacgatctagatatgtgtctgagattttggatgcctattgattgtgtattcacttagactttggtgcttttctagatgtttcacaagttaagatgttgttaagaggttctcattgttttattcctatgttctttccttccactcccaactcactccgatgtcactcatctgggttcttctgctcctgcctgggctgcttagtatttattgagctacacactgtgcttggcacccagggccatggaggcaggcaaagaggggggacatttattcagcagcttcttactgagggtatgggtgccaggtgctcgctctgggaaggtgcaaatgaaatggatgatggctgagcctgaagaattcccagggtgaacagatggggggaagccagttcgggcagagggagtggcaaaagctgctgcttaaagtcgttgctcccaccgcgtggggagtaattggatctgtctgcagcactgaggcctggacaggaagatgggactggaatgcagaggggccttgcagggctcagtcggggccaaagggcagagaggcagggcacagagagaagctgtggccgccttggttggtcccatggaatcctcgcccattggggccatgggcattgatcgacactgtggagcttgaaatctcaccaggtggaaacatctctgccagccctgtaatcatttccatagtttcttctggttcttttcatgaacattttccaatatttttatttgagcattaataaaaggtttgcctatatacttaaatttctgccagaaagctttgacttccgtgatctagagcaagcttgtgcaaccacaagcaggtcacatgcagcccaagatggccttgaatgtgacccaacacaaattcgtaagcattcttaaaacattatgagccttttgtgtgatttttttttttttaaactcatcagctgtcattggtgttagtgtattttatgtgtggcccaagacaattcttcttcttccagtgtggcccagggaagccaaaagattggacacccctgatttagagttttaggacttaggttttgggaatgccaaatgtttacatggaaaggctcatccattaggatgagcatggttttcctcatgaactccttggtagaacctaatgttagtgtgtggctcttttcctttattattttcttctgtacagggtactttataaccaatagctgtttctgaaaatatgggaaaactatttttgaatattgaatcaattacattttcagggtagtttgataaaaggcattctgtggtcatctttatctaaaacgaatcctcctggccttagtgtgattattttattttatttattttattttattttattttattttattttattttattttattttattttattttattttattttatttatttgacagagtcttgctctgtcacccaggctggagcgcagtggcgcagtcttggctcgctgcaacctgcacctcccagattcaagcaattctcctgcctcagcctcccgagtagctgggattacaggcatgcaccacaatgcctggctaatttttgtatttttagtagagatggggttttgccatgttggccaggctgatcttgaccttagatgatccacccaccttagcctcccaaagtgctgggattacaggcatgagccaccccacctggccttagtgtgattttgtattttatgttgtgagttttgtttttaaaaaagaacatcagtaagttcagaaaccaactccatgcttatttgctgtaatgaatttttcccttacattggaaaaacacagttccatctgtcctgaaggcccataagtcacagaatgcggtgtgttggaatgtgaaatcctttcagccttgcagaatctttatcattgtgctaaattgccatgtggaagaatggcaggtggcagttagaacttagggctttctatttattctctttctattttgcattagtcagttaaggttctgatcttcagaactttgtatgaaagtcagtgcttcatacaatttcacatcaaactgtggcattgcaagaggcaaaccatttggaattcttccttaaattacaaaaagaaaaaaaaaagtgaatgcacgaagattgttttgttcgcaagacttatgacacagccctccagctctgtggcttttcattctgatgggaaggaaatgagaccattgtaaatgactgttcagaatattagtgccagctccatgccaagtgctgttaagaacatggagagagcattcgagtgtttgcctctgaatttttgcccaggccatagttcgcagttggccggcaggctgcaagggccattccaagtgggagaagcattccatccctgggacaagtaaacagaacctaaaacaaacacatgtttagttgaagtgatacagcaccaggcaaagtgttctacttttaatgagtgaaggacatcagaaacaaaggatcagagccccccacgttgcattctcaactaattatagcactaaggcaggaatccttggccctttatctggagtgagtcagagagtatatcatgccttatctaaagtctaaagttaattgagcccaaggcccttctgaatagacacacactgtaatcagatatacagatggagtgggaagaggtaaatggtttcagatgccagcctggtgtagttgcatgccggaggggacttaaaggaaacagtgagaagtattagaaaactgtagttgaccaggtatggtggcttatgcttataatcccagcactttgggagactgaggctggaggatcgcttgaacccaggagttcaagaccagcctggacaacatagctagaccccatctctacaaaaaataaaaaattagctggatgtggtagtgaacctatagtcccagcaacttgggaggcggatgtgggaggatcgcttgagcctgggaggtcaaggctacagtgagccatgatcacgccattgcactgcagcctgcgcgacagagtgagattctgtctcaaaatagcaacaaaaacaaaaaccaaaagtatagttgcagagaatggctttccctgcttagttttatccagatgactgttagaatagtggtgaagaatctgacaagtggcagaatgcagggccatgggaagggggagagttcatgcctaaggtcagctgagcagaggagacttggagaactgagaggggatccctctcctgtgtttgttgggagggacagagcctgttgcccagcctgcaggtgtgggagggaccctgcaagaagtccctttggtcaccctcttcaggccccacattgcctgatgaggttcagactcctaggcctatgaagggtaataaggcccgtctgttcctgcctttacttttcttctatcagtttctaagcactctcagcctccgggcctttgatcgtggagcgccatgatacagtggcgttgtcctgagtggttagaggtgtgaattctcgaggccgactgcctgggtttgaatccttgcttggccatcttccagctgtgtgaccactctatgcctcagtttcctcatccgtatgataggaatagtggcagtacctatttcatggtgttattgagctgtacagttgctagctgctgccatcatcattgtcatttcctcatttcttttagacccaaactctcacactttccggaattatttctggagccccccagaaggaattggtctcttttattctagattccctaagaggcacagagggatactagggtgagaagatagtggtggctcacagtcatcactctgtacttactagttttgaaaatgtatcaaattgctgacgtctctgagcaccagtttcccaatgtgttaaagaaggatggtgatacccaacccatgtcacagggtttcgtcagtaaatgctaaaccatgtggtaagcagatgttctcagtgagcaccaggtcactattattatgttacttgtcatgacgagttttacttgccaccttgtattatagttgtgatgactatcttttttctagcctcactgggacacatgaaattatagagttaaatgaactcatttgtagatacttgaaaattgtaataatctttgaatatctgtacctgtttgtgtccagattcttctggttattttgacttccttataccccagtgtccttttttttttggagacaagtttttttctcttgcacaggctgaagtgcagtggtgccgtcgtagctcactgcaaccctgaagtcctgggctcaagcaaatcccagtgccttataagcaggcttcctcaaggcctgttgtcttactcatctgtattttccttatagcatctaggtcagtgccttgcttataatgggcatttggcaaatgtttgttgaatgcatttatcattacttagtaataaatactaaactattttttaatgggaaaataggcaggtttgggttctcatgcacatgacccacatttgtcgaatgtctgctgtgtaccagccagcagctttcttcctttagtgctatttcctgttagagtgggatagtggtatttcagtccacctgatgaccatttaggccaatcacatgttaatgggaattgaatgcatgcattaaacacaacaccagcgggtgctgtccacattaaaaccaggaggtctgcttcattggttcttgactatattgaaagagttggaaatctgacctgggcatttgaggtagactctaaggggtgtaagacggccctttgttttagagacttaggattggtgtgagtgactggcagggactgctttagtgcccagacctttagtagcacacacacaatataggaaaactcttcaaggaaaaccagccccaaataagagagtaggtaatgttctgcttctcttgctttatattctgcttgctttacagaataatctgagatagctaataatcaaagttcaggcccccaaaatgaaagtgatcatcatagaaccagaaaagaagggataaaatactgatttcaaggactcctgaagccaatggcagctctgagtttcctggcagccaagacaaagacagaagcatgctgggatgatgcatcctcgggctcggtaaaggaagtacaggacctgcctgctgctgtgggctcagggaaatgagtactattttccctgtctggagtggggaggagcacttgtctgtggtagggtgaggaggaccacttccttgggctatcagtcattaaggccccttaacatcatggccgattctgaaattacctctgaaagttgagatttatgttagactgtagctctcaagccagttcccttagaggccagagtaatgacagtgtaatttacttgccacctgcttgagagagacaattggtggttaagggactttcccaaggtgataaattgttttagcaaacagatccagaggacagctcctttcccctggtctatgtatgccttttgaacgccaagaccttatcctaaactcaagtttcacgaataggattaaaatactctttggggacctttcttacattgagaacagaggctgggccacagcttggctaaagcattccagatctctcttctgagcaagagattttgacttgttcataaaccaggctctctctcatagtgggcaaggccttaaaaacaaacaaacctgcaaaacctgaggaaacatcttcctcctacgtacttagctgatgtaggcattaatggaaatggatattggagtgggaggctccttttagggggcagaaaagaaagaacgtttttatttttaattaaaaaaatattttcttttgagacagggtcttgctctgccatccaggctggagtgcagtggtgcgaatatggctcactgcagccttgacctccttgctcaagtgaccctctagccttggcctcccgagtagctgggatgacaggcgcacaccaccatgtctggctaatttttgtattttttgtagagatgaggtctcactggcttgcccaggctggtttcaaggtcctgggctcaagggatcctccctcctttgccttccaaagtgctgggattataggtgtgagccaccgtgcctggatgaaaaagaaataacttgattatgggttatggaagtttagcaatggcttcaaaaaatgtcagcagggaatggatgtctttttctttcggatgaaatttcagtattcatctgatacagccaaccaggagaaggaaaactactaagtagaaagacttagataagtggagtcgaacatctctgggcttaaaaggagcatcactcctggcatattcagcgtggcccagctgtgtttctctgagggcgatgtcctcctcagggtctgtgaatggctgaactcagaacaaggcttttgcaatctgcgccttctgaatacagtttttgttctgttggtttaatttgcatttggtgtctggagtgcctggtcatggaaagagcccgttctttgttttgggtaatgagggctgaggtttccaataagtatttctcggttccgtccgtgtcgagtgtcatttgagtagcaagtgactgttgctcattgcactgggcctgcgagcctccatttgcacattagatttttgcataccctgcaattagtaaattacagaatgacatcatgaaatagaaaactgtattcccagatggaaatgctttccgtattctatgcatttttattcaaaggcagatgcatttgtaaacctctttggatggttgttctgcccttgtcagttacttcatagcaaatgtcaactgtaaaccaagagagagaatgagccaggatggagaacttttttttgtttaattgtgtcatgttgggtgctttttggaaagtgggtgaattattcatgatgacatgaatgggggtattattttaaattagtatagaagcaaatggttcacaacccatttattaagaccctaatgttgatgtggctaccaagaagctttaccagcaagggccagtgtgttgccttccttggttggttagtttttctacatccacttaactcctagcctaattttatcttttttttcctctgtttttctttccctgaatgtttttttaagctctgataaatcattttgaattaaggtcgggtatgtatttcctttcttctcatcttcttccccctccatgactgcctgcatttgaatacatttccattgtgtgagaggcagtaatggtacagaggggtggggggtggtgactgcttggtgagctgtggctcacatgtctccagagacacagggcctaggaagactgattaaaaatcaacttttaactactataacggctcactttcctgaaacttgttatgctgtaaccccacctattgaagacataatcagaaccagaaagtgaacaaaattgaccctggaaatatgtggcaaaaattctgtgcaataagtatgataacacttttctttcagtgaattctctctcagggcccactcacagaaccaattttgacatcaaattttcttccttttaaaaatacagttaacccccacccccatctgcaggttctccctctgcagattcaaccaactgcagattgaagatattcagaaatttagaaaaatgaaaaataacaatataacaaaaagtaatgcaaataacgcagtatcacatctatttatgtagcacttgtgttgtattaggtattatatgtaatctagagatgatttaaagtatatgagagggtgtgtgtaggttatatgcaaatcctataccattttatgtcagagacttgaggatctgtgaattttagtatcctcaggtgtcctggaactactccaccatcaatgctgagggacaactgtatataatataaaataaataaaatatgtactgtaaaattgtaatcttgaaagtttgatcctgtggcagctgctattttcaggcagctcagcctttgtttgcatgctcaaaaccagcttgtgatttggtttctaagatcacggctggcttattatctgtgctggcttatcatgacagtggctcggtgttatggacacagtgagcatttggtgtcgatactcccagaatgaactgagtagaatggacaggagactgacctttgtctatttgtctatgtagcagtaatgccactaacttgttgcagtgctctttatcctcaaactatttgctatatatagtaatgcttaaattacatatattatatatattacatatacatattatatatgtggatatattatatattatatataatatatataattatatattatatagatgattctgactttgcacagttctgatatgcatgagttgcaattaccatgatttaaataataccagttccccaacaactctagtcaaatctcagttacccccgtgtgttaattgagtaattgcatgaagtacacaagcttgctgctagtgcttcagtatacaactcaccatgtaaataacagatgcatgtcagaatccgtggccaatcacagcacttctttcaaagcccatgggtgattggtcagtgcacatgttccttagttcatgcacagacagcagagtgtgtagttctgtggccttcttggctattggggataaaccagtgtgacattttacaaaaataccaaaaatcgagagggaattggtgaacgaagataaaagtgcagcaaagaagctgaaagtgataatgctagaagtgaaaccaaaacctacatggaattatagaagaaatagctgactgtgggaatattggcagtacagctgttggagagactgcctgcgcagcccgaggaggagaatgcaggtttaccacataaacaaggaaagtggttgtgaagaaaagaataaagctgtcctagaggacatgaccttggcaaaacaaacaaatttcacattaaaggatctctcagaaccatttcccagcatagaaaatgcaaaggatgaaatgtatgcttattcaaacttacggctcctagcagcactgttcacaatagtggaaaggtagaaacagcccagttatccatcagtgggtgaatagattaacaaatggatgaatagattaaaaaacagattgtggtatatccacgcactggaatattgatttaaaaagggacgaagtactgatacctgctacaatgcggatgaacctgaaagataccatgctaagcgaaagaagccagatacaaaggtcacatatgataaggttctatttatatgaacgatcttggtaaatctgtagagaaagaacacagatttgtggtttggtttctaagatcacagcaagcttatctctaagatcggggctggggcgcggtagggaaatgaggaacaactgcttaatggatgtggagattccttctggggcgacagaaaatgttttgcaaccacgcggacgtggtggttgtatgacattgtgaatgtactaaatgcgcttaattgtttactttaaaatggtgatgttatatgaatttcacctcgattttaaaaatgtgacatttcaccaagtcatagaaaagatgcttcgcttgtataagttatgcaacaaaaagataagcacttttaaacatttcttgataagttttttgtttccagggttttaaatggcaatgtgctgaatatttcactatttttcacttccttgtacatttataactgacagtaatagagtttttaatgctttgacaaaatttttaagaagtcacagaacaattgcattttttccttttcatcactaacattgttttgcaccgtttcagcttctatggacattcttatggtttcatactgagtactgcctgtgcacatgtatttcactacacccccgccccccaaccaacccctccaccccccaaacacatcccatacccattacagcacgttgttgcagggaggattctgagatgcgtcttctacaatagaaaaagatgtgctgggcttgctgtgaaaaagcagaggaagttagaggtgggatattagcggtgaagttggtagaacctcagctgcttctagggaagagggaaggtaaagtcagcaggtattagggaccaggggaagcctgtaacttataaggtatggtaactatcagagcagtttgtgggattggctagcagctgtgtggccagtagctggaagaaccagtggtctggacatgtcctagttttgggaaatctgtcggcaaggagagcgctaggactgaaggtacgatgcctgaagcccagaaacgcataatgggctgtgacaatgctgtttcacttgagctcatcggatgctttcgaggattcaattcatatctccctgttctccctgcattttgacacaggccgtgcttgcatggcagttgggttagtgtattcccctctccaccagagacttgggagggtaggggagtgtgccttagtcattcttgagactcctgtgcctggcagtgcctagcaacggcttaataaatacttgctaatgaacctaattattatgacattaagattttaatctaaatcttctaaatgactatgggaatctgtttatttttgcttaggatcattggtaatgttttctggccaaagctgcttttttgtctgagctgtgtgtttatttttcattcccgtctcttatttatattgtgaaaatgattaagaaaaataggtggtatggctcatggtctgatatcacgagtcaatgtgttgttttgaagccaactccacacataatggttcaagccctctgactacatcttagttttactccagattttctccatcaatgttgcttgcatttttcagtggtactttttggaaggaaagaatacgaaagccagcccgcaaaagatcactgggtgggggtcatagtctgtgatggtgactgaattatctggtaaagcatatttttgccgttttcagggtcaggcttcagcataatgagattccagaaattgttatgaaaaaagaaaccttaggttacccagcagctaaatgattactgcatcagctagcagctccggaatggccatttggccctgtagaaagatcattcttgggcaggctgttgatgtggagagtgagaggagcagctgttctttcacctgaggccccatctgggtagcagatggtccccagctaggcacaagccctgtgtagggacatccgtgctgcccaggatcctgggacactgcccaaatcaactgttaggctgggagcctgtgtccagaactgtggatggcattcactttgggttgtggaagttggtttgtacctactcttaagtcttgccccttcaactccagctcaggctttttaaccctagtagaagctttcttatctgtaggtatttaagataagtttgaacctactggtctgtgggaaggtaccgaaaaagccaaaagctgcagctcctggggagcttacaggctcccccttgttgagagtctcccgagtgctaggtactgtgggtttaagggagaccctgcagtggtcaaaaggctgcctggtgaaggggggccggttcccatacttctcagatgtgcctttgggcaagccacttgcctcctggtgcttctcttttgtcatctgttaaaggggttagtgaaggacccttctcatagggttgttatgaagattaaatgatttaaagtatgcagagtgctaagaacagtgcctggcagatgattaaaaaaattgttacagaaatacagtacaataacatttttggtcacatttaatcctcaaagcaatcatgcagaaagggcaattgtcatacctattttgcatgagagactcaaccactcgcccaaagtcacagtgctagaaaggacttgagccaggatctgaacctgtcccctgaaatcttcacctgctttgcttcttgacacgggcaggagaatgatgaggaagtgggttagtctgctagggctgctgtaacaactgcagatggggtggccaaaacctcagacatttatttatttttttaatataatcttggatgttggaagtcgaagatcaaagtgttgacaggcgtgggttcttctgagacatccctccttggcttgcaattggtcaccttcttgcttcttcacatggtcctccttctgtgtgtgactgtgtccaaatttcctttctgtaaggacacagccatattggattaggcccaccctattgacctcatcttaacttatttactcctttaaaaaccctgactccttatacagtcacactccgaggtactggggattaggatttcaatgtatgaattttggaggtgagaggacacaattcagccaataccagtaaatgattagtaatcaaacacagggattgaatacgcagatattaaggattggaatgaagccagaatttggaaggattagaactgatggaggcaggtgcttggtctgggtgatttttgaaaatgattttcaggccaggtgaggtggctgattcctgtaatcccagcacttttggaggccgaggctggcagatcacttgaggccaggagtttgagaccagtctgggtaacatggcaaaaccctgtctctacaaaaattacaaaatatcagccagaagtggtggcttgtgcctgtaggcccagctcctctggaggctgaggtgggaggatcactggagcctgggaagtcaagtctgcagtgagcaaagatctgtgcctctgcaccccaagctggacaacagagcaagaccctgtctccagaaaaaaaaaaaaaggctttcaacagagtcagtcgtggacaaagaggaagggacttttttcctcccctgcagctttaacctcccaggctcatatgatcctcccattccggcctcccaagtatttgggactacaggtacgcatgccactatgcccagctgattttttttttgtatttttagtaaagatggggttttgccatcttgcttctgctggtcgtgaactcctgggctcaagcaatcctcctgccttagcctcccaaagtactgggattacaggcatgagccactgcacccagctggaaaggactttttgtgcggtgagaggaggatcctcagaatacggagatctggggtccgcagacccattgtgggatgcacattgatttagtcagatcttgagtgaagagatactgtgttagctgactgcgtgataaacgttagcctgagaaattagtttgttattttgataggcatttgagtcatttattgaactaaaagctttggggtgcctcatgtactaggcacgaaatcacagtacagttcttatcaggggagagatcatttgggtctcagtttcctaaaagtagcttttaactccaaaattgttttaatctatgtttgtagaggaacatcatgaaaatattttgaaattaaacttcttaagtataccttaattttatactgttattattttatttcatttttatgtttattttttgagacaagtttcactgtgtcgcccaggctggagtgcagtggtgcgatctcagctcactgcaacctccgcctcctgggttcaagtgattctcgtgtctcagcctcccgagtagctgggattttaggcatccgccaccacgcccagctaatttttgtatttttagtagagacagggtttcatcatgttggccaggctggtctcaaactcctgagctcaggtgatccacccacctcggccccccgaagtgttgcgattacaggcatgagccaccgtgcccagcctactgttattattttaattagtaaattttggtataatagagactggattttgacttaaggctatctgggtttaaatcctggctctgtcacttaatagctttgtcagatataccatatgacataaataggcagagtttccatcttatcacctgtgaaaagtggataactgtacacatcacattggattgccacatgcagtaatggatgtggaggttctgtccagcattgtgtctttcccatgataggcacttgtgctaatgctatgcaagaaggtagaaagttgaaagtggatagctaaaagtggaggcaaattaagggacttcttaaaatatttttatttaatagaaaacaatatatagcaagaaaatttggatcaattctttcatgcattcaacaattgaagtctgagaaccagccgtgattaggtgctccaaattagaataaggcaaggctcctgccctcattgagcttccaggcaggcgggaagcccaggagggcgtgataagtgctacaattcaggtgtgttcaggttgtcatgcaggtattgaagagggctacttttggatttatgcccgcagaagagtttcacagtttctgaatttttgccccaggatgggagcaggcacttgcattaacatttgaattaatcacccagagaagagtggaaaagttatttcaggcaatggtaacagcatgtgcagaagtctagagggatgggagaggccacatggcatggttggaaaatagcagctcaggaatccatttgctgtgggggtggtaagtggaggactagatttgtgaaaggggacagatcacacaggctttgggaacaactaggaggtttttttttgttttttttttttttttttgagacggagtctcactccatcacccaggctggagtgcagtggcatgatctcggctcactcaacctctgcctcctgggtacaagcaaccctcctgcctcagcctcccaagtagctgggattacaggtgccccccaccacacctggctaattttgtatttttagtagagacggggtttcgccatgttggccaggctggtctctaactcctgacctcgtgacccacctgccttggcctcccaaagtgctaggattacaggcatgagccaccaaacccggctgactaggagatttttaagcagggaagcaatttgatgatatttacagttttaggaagaccaaactgacagcagcttggaggctgatttggaaaggaggcagagtggaaggcagggttgttgaggggggatgttttagaaagattttgtgatgattctgctgagactgaggttctgaacttgggctgccctacagcagcccaggaggacagattgcagagctttgagatagttggcatcaagatgggtgtgtctggggtgggcatgactgggtttctagcttgggtgtccaagtggataaatagcctttcatgtggaggctgagggcatgggcaggttgagtactgtccttcttccccaaaggtagctggccagccatgggagtcaatccacatgggatggaaggatggagaatgccagctcctctttaaagacttggccctgaagaatagagcttgcaattttgtatctagggtagtcattaagatccgttcacacaggtttggatctttaatctccagaatagagggtgggatgctccctgctccattgagcccaggtcatcatgtgacaacctgtgactaattaggcagtgagctgatgagattcgtgtggctcttgagctaagcttttgaagccagggtgagactctctggccctcattatctcagctgtggtgcttggcatgtcccagaaggtagccgtgctgtggacctcagtccccgagggagcgctgtgccacctccacccacgatggacctgccctgagagagaagcctttgttttaggctctttaagatgacatggggattttggtggtgtttttctagcctaatctagcccttcctgactcaagtttttgtgtaagagaccaaaccttgctcattttcttttccttagctacaaatcagttttgaacttaccctttttcagtatatgcctgtgcatgtgtatgcctttgtgcgcaggcagacaaatatagctaggaccaaaagcatttctgctgttaccattatccttttgtccaaggtatttttcaatgaactaaatgtcagaaacacacacgctttcttaaaaaagcagctttattgagatatgattcacataccttacaattcacccatttacagtgtataattcaattacttttattatattcaacgttgtgcaaccatcattatgatgttaatttttttgtttgttcctcttgttgagacagagtctcactgtcgcccaggctggagtggagtggcacaatctcggcttactgcaacctctgcctcctgcgttcaagcaattctcctggctcagcctcccaggtagctaggactacaagctcatgccactacacccagctagtttttgtatttttagtagagacagggtttcatcatattggtcaggctggtcttgaactcctgacctcaggtgatccacctgccttggcctcccaaagtgctgggattacaggtgtgagccactgtgcctggctgatgttaatatttttattacccataggaagcctgtacgatataaccatcaccccccagttctcccacacatccctctccccatccctaggcagcctctaaactactttgtatctctacattttgcctattctggacatttcatataaactgagtcatgccatgtatggttgtttgtgactggcttctttcaattagtggagtgttttccagggtcatcaatgttatagcaggtatcagcacttcattcctttttattggtcaaatactagtctgttgtatgggatacattgtgttataaaaccatatggtttctagagatggaagccatgctgacccctgtagagttttgtttatccatttatcagttgatgaacatttggattgtttctgctttttgcttctatgaacctctatgtagtacattcttgtacaggttttggatgaatatgttttcatttctcttgggtttatacctaggaatggaacttccagactgttttccaaagcagctcaccatttgacattcccccccagcagtgtctgagggttccagtgtatctgcatcctcaacaacacgtgttgtctgtccagtgatagccatcctactgggtgtccctgttgttttatgtcatttaacaccaaacttagatcacatttctgcattactgactttgcacataccgtccccaacttgcaacttatgctgtcattaacttgtgtagatttatccatgtttggctgtttatgaggatttgtccgtgtcaacatgtatgtttcataaggacattcttaccttccattaccagacctacattctcaatttaagatttgatattttttcagtgtttaggttttcaattgaatcaactgacaagtttagtggcttaaactttcaagcttaaactgaaatgccaatcttgttttagaccaaaaattacatcctatctcttctcttaattgaggaacttaggtggtggttcctatttgtctttatttatttatttatttatttatttatttttgcctacttcagtttggtcggtaaactatcaattgtattttcagtatgtatatatatagagagagagatttttaaaattttattattattttttgagacagagtctcactctgatgcctaggctggagtgcagtggtgtgatcttggttcactgcaacctccacctcctgggttcaagtgattctcttgcctctgcctcccaagtagctgggattacaggcatgtgccaccatgcccagctgattttttgtatttttagtagagatggggtttctccatgttggccaggctcatctcgagctcctgagcttaggtgatctgcctgccttggcctcccaaagtgctgggattacaggcatgagccaccatgcctggcccattatatatacatttttaatataatgtgaaatcatgtggtctctactatagactgaatatttgcatcctaaaccccaatgggatggtattaggaggtggggcctttgggacgtgattaggtcctgagggtagagccctcatgaatgggattagtgcccttataagaagaggccaagtgagcttgtttgctccttctaccatgtgaggatacagcaaagaacgtgctttctgtgaaccaggaagtggccctagtcagacactgaatttgccagcaccttgatcttggacttcccagcctccaaacctgtgagaaataagtttcggttatttataaaccacgcagtctgtgatagtttgttagaggaacccaaacttaaaggcagcttctaaaggggagcaatgctgaccactctgtagtttgtatatttggtcaacacactttattgagtgatgagtctgaatttcatgcttgattgatgatgattggtgacagagtagacaaggtccctgcttcatggagtctatggtctagttggggaaatatacctttattgaatcaaggcagatgtgattacagattgaacaatggctgtagaaggaaagggatttccaagagagaattagaggggcttctcaaattgagtttgactttctctttggtgggggttgagtcaggaagaacctttttgaagcaggaaaaatctttagctgagacctaaaggaaggggaggagcttgcctgggaaggacactgtggtggctggagggggtttcccaggcagggacactctggcaggttagagtaactgaaataaagtctgtattggagtgcagagactgccagaagaggggctcatagaggccaaagtgggacggccttacggacgagctgataatttgggcattattcaaggtggggtgctatgtcattgaagggttttagcagaggggaggcattatccaagttaaagaacaaaacaaaacaaaacccactctagttgctgtgtggcagatggattgggattgggggtgtggggttggtggcaagaatagatgcagggggacaagttatgaactgagactgggacctcatgggtcttcctgcccaagaccgagatggctgggggtgggggctgcagctagggacatggggcctcagtgcccacgttttctgtcctctgtcccctgtgagggtatgtgcgctctcataccagccgccgggcactttggctcgcttgtgttgctgggagagatctcctttaatgtttttttgtgtttttaaaatatgaacgtaggccctggcagagacaaggcagaaaccacttttgagtttttagggccgtgcattcttaaacaactctgagtgacccttccatcattacaatttatcaactaaattagaaaacgtgctttcacagatttctagtacttgggcaaatttgttatttacgctcaagatgaagtgttgcttctagtgacagttttgctgttgggcagcatttgtagggtaaaggtgtttttgcttttggaatccattgggagatttaaaaaaaaaatatatatatatacacacacacacacacacacatacacacatataaagtaaaaagcaggaagtctatgtgtgtgccaggggatcccaaactcttggcctccagcagtcaagagattttttaaaacctttatcttttaccgtcttgctttttaaaatccattatgtctttgtatagtacttgacatacatgggcagaagtcatgctggaacgtgaagatgggagcatggactttctggagcatcccaggtggggttcctgtggctgctgtaaggcaggaccgcagagcggtggctgcagacagcacggatttgctattatatctcatagtcctgtagggtagagtctaacatgggctaaactcaaggtgtcgccagggctgtgttcctcccggaggctctaggagaggatccccttgcctttcccagtttctgcaggacatctagcagcctcagctcattgtcccctccctgcgtttgcaaagccagcagagtagcatctctgtggccattcccacatggtcacatctcctcctgggatgctctccttctgcctccctttgcactttcaggagcccttgtgattccattgtgtccatctggataatccaggataatctccctattttaaggtctgctgattagcaactttaattccatctgcagccttaatcccccttttctgtgtaagctgacctagtcacaggttctggggattaggactcgcgcatcttgggggaccgtcattccacctgcggcagtggtaggctaaaccttaggcgtctgatattgtgaacctggctcactggcctttgtcttcttgccgactcctattggtatttgcctgagatgtttttcttttctttttcattcttttttcttttctttctttctttcttttttttttttttttctggttctgggcccacagtaggtgccttagaatcatgcagtccagttgccttctgggaatccattgtagtaagtggtagaggtttttaaagcagtcctaggggagatgcaattccctgcttacattcaagtttttcgggaagacaagtctgtttaggaaacataggaggttagttgcattttcctcattaatgcaggatattaaaatattcagagggaacccaggagtcctctcaagatgagtttaaatttctcatacttgtagaagttgttgagaaacactggattctaatttccagaactctggtggggaaggagactgtgaacctggtctgaattgagaatggggattgaggatttttggacttttgaaagattgacttactctctcccgttagttctgttgaactgctgcctaaatggagggaatgtgcatcctgtcttgtgttgtgtggcaatgcagtggggacacttgggacatgagcaaaacgttgacagaggggagcacttcctggaatattattaatacagagttagttttaacttcaccttttgggcaaacttgacattatagatcttgaaataggattatttttcccttgctaagaggttagcaaaatcagtacagtgtgtctctttgacaggccctagaaagcactctacgtttgttaactttaaatttgggtcggaaattgatgttattggaggagcaaggcgtgtttaggcctgatgatttttggatagcttgaccaaacccggtacagccaactttcccccaaaactactgtgtccttctcagtggttcctgtgcctgcacagggacccagcgcacaccccagtgtgcctctttgggctctggctaacttaggctgacatcctgatagaacgcagtgaccacctggtcatttgattacagcgcttcttccagacagcacgctcagaattgcgtttcttacttccagtcttcttgccctgtaagcattttctgtgagtcaccaaatcaaacacaaaatcatataattttatggaagtggaaaatcagacttattaaaatactgtgtttttgttttaaagctcagaggtatagagatccatgaatttttttccatgccttctcataatgtggttttggtttagctgcggttcttccaggcgcagatgtcagccctctgcagatctgctgcatcagaatttatggcctgggtcttaggaatttgcaatttaaaataaccccttcaggtgcgtctaatgcagcctaaatttggggccagctcatgggttgtaaactgtactgccctatacaatagtagcacagttctaggctcaagggactcaagggggtccagtaagtacagttcaccagagaaataacaaaagcattagcagagggagaccagagcatcatctttgttagggcaaaggcttaacatagaggaatgtggcttctatgtccaggccagtgggcttcctaacacagaacatggaattaggcagacttaacatcccccatgcccaccccggtgagtgccagcatgggcttgagctgctcttcacactgatggtccatcctttggactgatctccttgtgaaggatacaatacagcaaggagcgggggcttggcttggcacagccagttctttacccaaactcctgccaacgctggcccttctttcttaccctggttggagtgtgtgagggtgggagaggcaggaggaatatgctggacagagcttcttccatctagaagggaatttcaggagtaagaaagcagcagctcttaacatacctgggagaaagcaagtgcttagtaaacagttgaggaatgaactaagaattttcagacagattttcctcttctggagcatttgcagaaccgcctctttgctcaagtgctttgttttttacagattcatttaaggtcatggttccagacactaatgtaaatcagcacatatattattgaagaagtagaatacctccaggcccagttgccttggagcaggaaaaacagttcatcctcattaccatccagaataatttatgttcaagataatacacaatcaatttactttttatcatattcaaatttgatttgtgtacacttttgagtttggatgtcagccacattgcttctgtgtgttaatctttatttacgggaataaatgggaagcagtcagccattttttattctttattggggaactgcattatagtggaaaaggtaaaattataagctaatgagaccagaggtctgtatgtatgaaaaccgtcctcatcgcttcacagttgtctttgaaccagtttccctgggattgttcgaaatgtagcaaacgtggctcacggttaccctgacggggccagagcaatagggggaggtgtgggcacctgtatacatttgcgttgaaaaacgtacccgggctattctgaggtcctttcctgcccccagcctggtttctgggcctctctggagtctctctttctggcacttgtgttctggaatcgcttatcagcctggactccttcagcagcagctgccacagtgtctttgtagtcacactacacacctatatactccatgacatggagcgtatagaatgtttcccgtcttcctcgtcagtgctgccaggagaagcttcccctctcctaacctctggatagtggctggctctgctttattcaggcattgctttcattttttagaacagctgctccagtatgcttagtgtgaatgacagcccagcagaaagaatggacttgacactggacactgcaccactccacatttctttgtcccctcaagatgacttaactagctcccttcccttttccttcatgcaatagcctcagaagttcggctggcattgccaagttgttagagtgaaccttaacctgtgtatgactcagaattcacatctgctgtgtcagtgaacacacagatctctttgtgaacacatggttatcaagaggcacatgctcttacgtatcctgccggattctggtaaggcgctgcttgcgcagtaagcacttgtcaggtgcttatgatgcctgtgacgtgaggctgtggatgcagaatttgtggtctgaacatttttgagtagataaaaatggaaactgaaattggtgaagcagacttgtggcttttcctattttctcatctcttttatggatataactagaagctctgcttcatcaatgagtgtgttaaaacaatttgtttacaaaatcctatttattaaaataaaaatctgaaagaactgcgctgctgcttttcagtgctcgccactctaggaacctgtattcctcctcttgttcatcctcccttttcttcttttttgttttgttgttgtttgtgtgtatgtatgtgtctgtgtgtgtgtggcggggtggtgggggcggtgttgccaaatcttttgcactgaatctttgaagatgtcctgaaatacttaccaaatcactagagcgaagagaagcccatctgatttcttcatctcccagctgaggaaggacacactttctcccactctccagtgaaggcccctgtgtcctgtgggtgggggagctgacatcacactcagtgctgacatttcttgttccctgggtgggcgctgattccagatcctcttcagccccccaagcggaactgggtttctcttgaaggtcctaacctcagctcacaccacctgctactacctttctgggtcttggattttgttgttacccaggcccggggtcatcccaaaggctcttgatagccctgtggctgtgcttgctaatacactgtcctcatcttttgtcagcgaagtaaatccaataatgtttccttctctttaatccaagccagtcttcattgaaaacacttcacctctaagctctcaggctctgcagtctgccctctccaaccttacccctcatgccccaccttccctttgtccccatctttcccttctgttccagtcattctcatgggccatggagagtggaagcctgggagggctttgccaaagtccagttgcctgctcactttcctaagggccagagcaatgggggaggtgggggaggtgtgggcatctgtatacatttgtgttgaaaaaggtacccaggctattctgaggtccttttctgcccccagcctggtttctgggcctccctggagtctctctttctggcatttgtgttctggaatcgcttatcagcctggactccttcatcagcagctgccacagtgtctttgcagtcacactacacacctttaccccgatccactgacctgctgtcccggatggccctggtgtgttctctctgttcctagccgcagaaattgctggtgaatgtcaccaagctaagcggtgtagctttataacaagtggattcagccagctggggctggacgactgagagtttgcagcccctgctggaccctgtgtaactgtccagtttgcctagctattggtttggcccagtggttttcaattttggctgcacatcagaatcacctgggggaggtttaaaaccctacctctgcccccatgccctggggttcacacccagaaatgctgacttcattggtcgggggctggcaggcctggacattggcggtttgcttagaagctgcctgggtggttctcatagcagccagggtcaagcaccacggcctgttcttacctggctccccaggccccctttaatctccctctgcagcagattggcacacatcgcattgtggagcaagccatctgataattttccttaatcgtctttgaagatcttccctctgcctgttgatcctttaaggaagaagtctccttgccaggatcggcctctccagtctctggatcccttcttgcttgctctcttcagaacccatgaaacctctctggctgccttgacgtcagccagattggactgcccaaatagaaaggcagaaatccctgtcgaggccagacagcaaggatggagaggggcagggggtgaaatgaaacgcaccaggaggagtaaagacaaggccttctgatgtcagccaagagcaggtgtggattaggcagtcctaagtttgagtcctggttctgctattcattggccaattgtattctccctccctctacgatgaggttaattacagttacctcactgggatttgtgaggatggaatgaggtaacaaaacataaaatactatcagtacaatgcccagctcataatgagtatgcagcaaatgttcaccctttaaaaaatgccacggccgggcgtggtggctcgcgcctgtaatcccagcacgttgggaggctgaggcgggcggatcacgaggtcaggagatcgagaccatcctggctaacacagtgaaaccccgtctctactaaaaatacaaaaaaattagccaggcgtggtggcgggagcctgtagtcccagctactcgggaggttgaggcaggagaatggcatgaacccgggaggcggagcttgcggtgagccgagatcacgccactgcactccaacctgggtgacagagcaagactccatctcaaaaaaaagaaaaaaagtccctttctaccttcaaattcaggaaaattttctttagtccaacagatgtaatccccccctcactcccccatccccactggtatctttatgtactcaggtgactattaccatattctgcttggactgtttttatacattgcagataatttgaagatatggatttaggtaggtttttagatttataataattaagtgatgtttttctatcaagtgatgaaagtttcaacagatatttgttaaaatttaatttagccaaaggaagacatgccatttcagcaatgtgatctaagtaaaagtgtcttctcttttttttggtggggagaacagagtgtagaatgatattagtaagatagagaattgatgaccaaaccataactgctagcattttagtagaggacacaacagagaaaggattctcacgtgtgttattaggatcttggatgagagtgggctgttattttaactttggcccctgttggagcaaattactctttgggggcccggttttcctcaggaactacctacagaattcagtgagatagattttagaacccttctgaatgctgctggtttggagattctgtctgtagcaagttttgttcagttgttaatctttctttcttttctttcattctttttttttttgacagggtctctctatcacccaggctggagcagtggtgtggccctggctcactgcaggctcaagcgctccttccacttcaactgcccaagtagttagaaccacaggcgagttccactacagctggctaattaacaaaaattttttttgtagagatgaggtctcactgtgttgcccaggctggtctcaaactcctgggctcaagtcatcatcctgtgttggctttcgaaagtgctgggattgcaggcatgagccaccacacctggccaactatatgttttctatgtttattatattttctgatttgtaatgtattttaaaattatcccaataatatatgaatgcaatcttgaaaaatactcagcatagcctttaggctaaaaagtggaggtctgccatttctctgccttgccccattcccttcccatgtcttattttccctgttaccaggttggtgtgaagcctttgagacctttttctctgcacacccatatatgtgttttttctatgtttttatagtattgtttcatttaaaaaataaactaggtttttgaacttgagaaatttcaactcgttctgctcagagctttgttttattaaaatcagtgcctgggagttgctcaagtctttgggctgtgtcgccctctagtggtagccctttggcttacagctgccattcagccctagggctggggtggaagtgatggttttgtgcccacaacctgatggcagggttggcagtgtttagttgctgacaagtgtctaaaactcaatctaggccgggtgctgtggctcacgcctgtaatcccagcactttgggaggccaaggcgggtggatcacctgaggtcaggagttcgagaccagtctggccaacacggtgaaaccccgtctctactaaaaatacaaaaattagccgggtgtggtggcgggcgcctgtaattccagctactcaggaggctgaggcaggagaatagcttgaacccaggaggaggttccagtgagccgaaattgcgccattgcactccagcctgggcaacaagagcaaaattctgtctaaaataaaataaaataaaataaaatataaaagtctggtgagccctggagtggtgtttgccttgctacctccaacttgccctttttaagagacttaaaatttgtggtaacttttcacatgatgtgtatttagatactgctgagttaatgaggctgctatacctggctgatttattgtttgctttcaaagcagttgtcaagtggtgtccacccatcccactgatggattttttttcttttttctttttcttttttttttgagacagagtcttgctctgttgcccagactggagtgcaatggcatgatctcggctcactgcagtgtctgcctcccaagttcaagcaattctcctgcctcagccccctgagtagggattacaggtgtgtgccaccacgcctggctcatttttgtatttttagcagagatggagtttcaccatgatggccaggctagtctcgaactcctgacctcaagtgatccacccacttcagccccccagagtgctgggattacaggtgtgagccactgcacctggccccactgactgtttatatctgttatactgttcttgcctctgtgccttttgggttccctgtcatggcagcatccttacatcctccaccacctctgaatgttcccgcaccttctctttctaatggaagcctggctggcccttgaagacaccgccaaccctgctggtctcttcacagagtatccacccagcaacctggcctgtccattcttgacttcttctggtccagctgcctttctgtacctcattttagtgaccctttttagatctcgtccaggttagcctctagaaccctgatctcaggcaccccactctgcgatcttccgttcccagccttcccacttgaaatcgtcttggaaatcccgggctttgccaatctgtggacccaccaccttttcaccccctttccggtgccctcaggggactttgctgtagcctgaacctcatggtcccttcctgtaaacagccaaactgctttgtactccctgaggagacccccgccccggttggacaccccaccctggttaaacccactttcacaattattccaaaactgccaactggacttgcatctcttcagatcggctgtcatcactcattgtatcaggaatcttattacacttttgcagcagtttcatcggttcagagaaaactctttcataccttctgctcatcagttctccacacctcccatcattctcctagctgatgactttgctgcttgtctcattgaggaaagaagccgttcagtcagtgagaccccctgtctcgcctccacctttccacctgctgccgcggaggcttccccagctcctgtctcactcaggccccttgccactctcaaggcatcttcttcctgcttcccaaggatgtcactcctgcagttaaccctttttcctcctgcattattcgtttcttcctttcttccgcatccttccaaatagcgtaaaaacaggccttatgacgtttctctttaaaaatgtccttaccagtgccacgtccctcttggccactgcccctgttgtgcctcactccgtagaaagaagtgacctgtagagactatatcctgccctctccagcgcctgccttccgattgccccttccagtctagtaactgtgtccattccttctccaatgaccgggtgacaagctgtcccttctgagagtgccagagggtgttccccgggtgggaggccggatgtcagtgccagctgtgctgtcctgggtgagcctgtgagggaccacatctggtcagactcgtgcatggcctgccctcatcttcctccgcctgcggtgcctttgagagcattgactccactaagcccgatttctgtgtggcatgttgtctgttcctccccggcctcctcgatggctcctccttggtctccctctggctactcctctgcttctccgcctccaagtgctgctccaagtgccttctgtgctctgtctccatccagcccaaaccttccaacactctctgtaagtggaatctcaccttgaggctgccagcccagcctcctcacctctgtgctccatctttagagagtcacctctctgtctggcattcccacttgaggaccaagatgattctcaaccttaacgtggcccacatggagccgctgctcttcctgcccagatctgccttcaccaccacatcctgcccactgtcactaaacggcaccagctcttacctggtttctcagtaaaaaaacaagtttatcatcttccctcacatactttattcaataataatcactaacatttattgagtgcttcctatgtgcctgacaccattctaagcatttgaagaagagtgtattaacctgcatgagaaaggctattaaaacctatgtaattaattaattaatggatggatgtgtggatgaatgaatggcagggtcttacactgtcacccaagctggagtgcagtggtccaatcatagctcactgcagcgtcagactcctgggttcaggcagtcctcccacctcacccttttgagtagctgggactacaggtgcttgccaccagctaatttattaaaaaacattttgagagatggggtttcatgatgttgccaaagctggtctcgaactcatggcctcaagcgatcctcccactttgacttatagattgtggggattagaggtgtgaggcatcgcgcctggcctgtaataacctatttgtgaatgagaaaggtcaggcacagagaagttaaataatttgctcacagaaatttcctgtgttgcagctgagatttaaatccaagcaatgtgtttctaagcctgggctcttaactgtaacactgtcctcttccccccaccaggagggtgtgtgtgtgtgtgtgtgtgtgtgtgtttctgaatctgaccagttgaggcaggctttcatgtcattctctctggccacccccttctttgttcacctccagtctttggaatagtcagagcgatgtgttcatggtagaaatgaaatcacatcaggtcctcagtggcccatcacatttagaactaaagctcacccttgcctcatgcctctgagcccttatatgatctcgagtcaccaccccactgccagcctctccactctcttctctgtgcctcatgcagcccaggaaatataatttggaccgcaaatgccagccacctatgtacggtaacttttctagtagtcacattaaaaagaaaacaggtgaaatgaattttaatgcattttagttaactcatgatatcaaaaatatttcaacatgtaatcagtattcacacaaagattaatcaagtatttaacagtcttttcttttgatccggggtcttggaagtttgacttaccacctctcaatttagccagccacatctccagtacttggcagctgtttgtggctacctcatggacagggcaggtcccgccacccgggcatccgtctgcctggcgcacgcaccaaacgggttccagtctggggaagttggcatctgctgttgttacttttggtcagaacgcccttcgcctgcgtcctcacggggctgactccctttagccttgaaggggaccgttgctccgagaggcctgaacactccagctgcagctttctccccagtcattattgagatcaaattcacatctcttacaattcacccatttaatgggtgatgcaatgcggtggcttttagtatattcacacacatgtgcagacatcaccatagccaattttagaaaattttcatcagctgaaagagaaaccttgtatcctttagctatgactttgtgattccctgttcccctgagcccctggagaaccctatctttctgtctctgtaggtgtgctgattctgaatattttgcataaacggaatcatactagggggtcttttgcttgggacccctttcacgtggcgtgtttccacggcccatcccgtgtgatagcatgcatcagtacttcattcctttttatggcagataatagcccattgtatggatataccacctgtttttttaaaaagtccattcatcaattcatgagcatttggtttgtttctactttttggtagaatgatgctgccatgaacacttgtgtgcaggtttttgtgtggacatagacttaggaatggaataaccatggagttacggtaactctacatttaagcatttgagaagctgctggcctgtttttcatctgcaccatttgcattcccaccagcatcgagtgggagctccagtctctccatatcctccccagcagtcggttacccttttctgttgcctctgtagcactttctaaacataaaattagcttatttctttgcaggtgtctattgcaccccccaggaatgtcagttccctgcagactctcactctgccttggcacccgcaccccagcacccaggggtgaggtgcctgcctgggcagccctgtcctcacctggggttgactgaccagagaacccttgcgattctctctctgggtttctgtctgcattcctgtcgggataggtgagactggggtgacggctgctcgcggcttggtcaccttcttctctgcttacctgttcatgctctcttgcttttctcggatagcaaaccccgtctcctgtcatcctccctcctggcggaccagagctatactggcccataaaggagtgctggccacaccaggctagattccagttgagcttaaataaaacaaatagaaaggtcctccgtggtattagccatattgtaggtgctccgtagacacatgcggctagtggctgcccacaggacgctgcagatgtggacgtccccgtcatcacaggacgacattctgtgggcagcgctgtatttgtttacaaacacaattctttggctgtgtgaaggttcaggatgatacctttgccattatgattcatttattcatttcaggctggacacggtggcccacacctgtaatctccacactgggaggccgaggcgggaagatcgcttgaggccaggagtttgggaccagcctgggcaacatggcgaaacctcacctttatttaaaaaaaaaaaaatcggccgggtgcggtggctcacacctgtgatcccagcactttgggaggccgaggcaggcggatcacgaggtcaggagattgagaccatcctggcctaacacagtgaaaccccatctctactaaaaaataccaaaaattagctgggcgtggtggcaggtgcttgtagtcccagctactcaggaggctgaggcaggagaatggtgtgaacacgggaggcggagtttgcagtgagcggacatagtgccactgcactccagcctgggccacagagtgagactccgtctcaaaaaaaaaaaaaaaaaaaagaatcaacatttatttatttattatttatttttttgagacagagtcctgctttgtcaccgaggctggcacgatcttggctcactgcaaaccccacctcccagttcaagtgattcttgtgcctcagcccagtgccaccatgcccggctaatttttttgttttgttttgttttgttttgctttgctttcctttgttttgttttgtttgagacagggtctcactctgtcgcccaggctggagtgcaatggcacgatctcggctcactgcaacctccacctcctgggttctagtgattctcctgcctcagcctcccaagtggctgggactacaggctcccgccactgcacccggctcatttttgtatttttagtagagatggggtttcaccacattggccaggctggtctctaactcctggcctcaggtgatccacccgcctcggcctcccagcgtgctcatttatttattttagcatcccttcttgtgcctggttgtaaagttcttcttatcccaggaaacttaataggtcaaagaaccctccccttgaggcagtttggatggggctggctgggaattggtatgtccagctgcccatatcgtggcctctgagtcaattatacaggcatctcggcaacttgaagttttgagtcccaaaacaacagattccatagcataaacagtgcaacgtaaatcctgtcccttgtccctcttccattggatacccttgtttatgttctctctggcaactgcctgtagcagggacggatgctggaaatcctggcggggccacgtcttctgtgctttgtaggcagctatggctggatggtgcttgctgtttctgtgtgtaaatgttgggatttttaaaagcccttccctgcttaatgcgttgtggttgagcagcacatttaaatgcctgaagtgtaagatgaagtctcttggatgtagagggcagtggtggtttttatttttcctggttgaacttggcctttggattgctgactgcgagctcacggtactgttaatgattttctacctacagtcacctgctgtgctgagcacatcaaatacagtgcggttagttccaagctatgaagcgcctgtcacgcatgtataacaggcagacctcattaggagggggccttgcataggggtcacattttccagcatttgttttcaaaatggaaatccagatcacgcatttgagattaaaataaaaaaagcggcctgtgctttatcattttctttaacttacatgcctgctggtccagcccagattgctgatagaggaagccctgagaaagttgcccagccagttgcccgtgcttcaagacacaaagggctgactgaggcatccgtgcctacccttggctgctgctgctcagcctgcttgcatctcgtctgttttcagttatcagtggtgtgagaaaaacacaacggtggattcagaaggagaaaccaagtcatctgcatttggcctcagtgtgtggactgtcctgaaatttgagtacagatgtgttcatgtcctgggattagataaaaagagaggaaacacacagtgaattcttatggtctgtcatttcagttggccatcttctgcccctctgttctggaagcttctccactaaaatagagcacccaacttggttttctacttgctttctggcccatcttgagttggaggaatcatgtgtttcagaactcttgctggtggtgggtgggagatcaacaaatgatttcattaagctgtgtgttcttaataaactttgggaagatttgtcgcagagaaactcagatagggaccttgtgatctcagcagtcatgggtttatcttgtccacacgcgtggcttcattgggatttggttggttgcgatccagcagaactgtggcggtgttgggctctgttggggtttggttgtgagcggaactgtggtgttgggctctgttggggtttggttgactgtgatctagtggaactgtggtggtgttgggctctgttggggtttggttgactgtgatctagtggaactgtggctgtgttgggctctggagtttggttgtgatctagtggaactgtggcggtgttgggctctgttggggtttggttgactgtgatctagtggaactgtggcggtgttgggctctgttggggtttggttgactgtgatctagttgaactgtggctatgttgggctctgttggaatatggctgtgatctagtggaactgtggcggtgttgggctctgttggggtttggttgactgtgatctagcggaactgtggctgtgttgggctctgttggaatttggctgtgatctagcggaactgtggcggtgttgggctctgttggggtttggttgactgtgatctagtggaactgtggctgtgttgggctctggagtttggttgtgatctagtggaactgtggcagtgttgggctctgttggggtttggttgtgagtggaactgtggtgtcgggctctgttggggtttggttgactgtgatctagcggaactgtggctgtgttgggctctgttggggtttggttgactgtgatctagcggaactgtggctgtgttgggctctgttggggtttggttgtgatctagcggaactgtggcggtgttgggctctgttggggtttggttgtgatctagcggaactgtggcggtgttgggctctgttggggtttggttgtgatctagcggaactgtggcggtgttgggctctgttggggtttggttgactgtgatctagcagaactgtggcggtgttgggctctgttggggtttggttgactgtgatctagcagaacagtggcggtgttgggctctgttggggtttggctgtgatctagtggaactgtggcagtgttgggctctggatttggttggttgtgatctagcggaactgtggcagtgttgggctctggatttggttggttgtgatctagcagaactgtggtagtgttggcctttgttgggatttggttggttgtgatctagtggaactgtggtggtgttgggctctgttggggtttggttgtgatctagcggaactgtggtggtgttgggctctgttggggtttggttgtgatctagcagaactgtggtggtgttgggctctgttggggtttggttgactgtgatctagcagaacagtggcggtgttgggctctgttggggtttggctgtgatctagtggaactgtggcagtgttgggctctggatttggttggttgtgatctagcggaactgtggcagtgttgggctctggatttggttggttgtgatctagcggaactgtggtagtgttggcctttgttgggatttggttggttgtgatctagcggaactgtggtggtgttgggctctgttggggtttggttgtgatctagtggaactgtggcggtgttgggctctgtgggtttggttgtgatctagcagaacagtggcggttttgggctctgttgggatttgcctctgatctagcagaactgtggtggtgttgggctctgttggggtttggttgtgatctagcggaactgtggtggtgttgggctctcttggggtttggttgtgatctagcagaactgtggtggtgttgggctctgttggggtttggctgtgatctagtggaactgtggtggtgttgggctctgttggggtttggttgtgatctagcagaactgtggcggttttgggctctgttggatttggttggttgtgatctagcggaactgtggcagtgttggcctttgttggaatttggttggttgtgatctagctgaactgtgatggtgttgagctctgttggggtttggttgtgatctagtggaactgtggcagtgttgggctctgttggggtttggttgtgatctagttgaactgtggtggtggatcccaggagctgctgctgcttgtgcgcttcaaagttggattttgtgtttttttgtgtgcagatgcttcttggaatcttgcgttgctgtatgcctgtatacctggaaagttgtgggaagaacagtttaggattttgaaccaattttctcaacaagtttgattatttcatttgagacatgttctgatgtaaatatattctgaaaaggtgagatcaaacatccactttttactctaaagcaggtccccttgctcctctctgctagtgcattctctttcctttacagctccttctcctttctgaagcaggaattaagctgaagtaactcagaaagtgccagcgttaaccccaggggacagaaaccacagacccagggctgagggattgagtttttaatttccattattctccatcagtgcgttcagtcttttgaacttaccctgactggtattatcacttgaaagttgttgttattgttgttttgatggtagtggtggtggttttttgccacccacaggagagaggggattagaagaaaaagaccaatggagtttccttgggattaattaaatgtggggctgccacacaggaatgggtccaagggctgctgtatttaaataacttacttattttgcagaggtgaatttaacctaacatgtactacagtgatggagtaaaccttttcctgtttggaatatcacaaaaggtacttcaataattgcggatcttcctttgaaccctcctattgtcagatggggtagtggtacagttccttgttccagaatgctcttagcaagttgattaatctgtcacataccccagtttcctcattcacaaggtggcataataataggacatagagttgccgtgaagtttaatgagttaatgaatgtatgatgcttggcaaatggtaggggctcaagccaaccctcgttgtcttactgagcttagtgggccttggacctgctgaggactttgaactgagcattccgtgttattctcttttttgtttttttaaggggatgagagtgtgtgtgatagagttcatgacaatattttgtttaagaaaattgtcaaaacaaagttcaaatgcaatggatggaaagtgatttttaacatgtagggtaactagagatttgagatcagacaaatcgattaggagatcaccaaacccaaacagagaatgtgagttaactcatacttaggagatgaatgctggctttgaagaccatagcgtgcattttcaaaccagatggagaggccacttttctctgcagatttcagttattcgtgatgttaaatgactcgtcttctcttacttgcctggcatgtggaactgagtaaattctgtcaaaagaactcactgaaggaatgtgtaacagctgggaattggatgtcttttcagatttgggagagcctgtgttttgactgtgatggaattcttatggtttaatatgcttaaatattactgtttaacattttgacgtttttgaggacagggataattaggagaatgcacttataagtttctatgccaactgtttccactgctcccctgtttacatggtcccagggtttatacagggctctctgtagccccacaatgaatcttgccccagtgagcgggctctcacctcccttctatagatgaggttggagctcagaagaacgtagagaaacttgtgcatagttattatgccagatttagcagctggaacaggactggaacctaaatcttttttctttagataatatgttctttgcattaatgagtttgtgggttttttgggaggtgagaaatatgtgtaaataagaagtaaaaatcctaaattgcaagttgattttttttcttaatatagtaatacgtataatgcagcaaacatatcatttcccctccatgcttgctagactggcttatgcacacatcatgatgataatgaaggagctaacatagcaagcactcactctgtgctcattcataaggtggcataataataggacacagagttgccatgaagtttagtgagttaatgaatgtatggggcttggcaaatggtagatgctcaagccagtcctagttgcctttctgagcttaggaatcatggaatcatgctctaaaaacttcatgagtatgagctcgcttcatcctcataacaactctaggagatagacgttactttatgtccattgtagggatgagagtgtgaggtatgaaaggaagtgagcttaatattctttatttttattttttatttttattttttgagatggagtcttgttcactggcccaggctggagtgcagaggcatgatcctggctcaccgcaacctccatctcctgggtttaagtgattctcctgcctcagcctcttgagtagctgggactacaggcgcgtgccacaatgcccagctattttttgtatttttagtagagacggggtttcaccatgttggccaggctggtctcaaactcctggcctcaggtgatccatccgcctcgggctcccaaagtgctggcattacaggcatgagctaccgcacctggcctaatattcttaatttggctgtcggttgtcacccaaatcagttaaagcaattccatttcttaagtgaaaatcagaatttcttttcttttttccccttctattttttcttttaatcttttttcttttgtcttcaagcaattttcatttttttttttttttttgatattcagggaacctgaggcgaatgaaggggaggaacctgggagctactgactgtgattacagtggatattcacaaaggaagacctttagtacagtgtgaagtagtgagggaaagggtgatggagtaggagggatttaagtaaaacctttcaggtttaaggtcaatggaaagcgaaggaacattctagaaggacattagattttccttagagtgacattagagtttctgtaattggactataccctttagtgcctcaaatcaagggtttcacattttcttttttttttttggaattgcctgctcatgtatttccatctccttaaaggcaagggctggccgccttatttggctgatactagcctccatggcatcagcctgtccagtggaagtcctgaaacagtacacgatgaatggataaatgaatgaatgaatgaatgaaatgaatgagggaagaaatgaatattgtgcttccagaacgaggagagaagggacgatgatgtggcaaattggcccagcatcttaagatctgtattgactttagcctcatgtggtagtttaatgatactctctcttactcagggaatgtgccttttaagctgtggtctgtggtcaatgtgtgtgcacatctctgagagtcctggctgtgttgtgtttgtgatggctcccatatgtggtttgcctttgtatctgattgtaaattaaccttgacatgtaggtcacctgaccgtgtatggagagagaaaaatcactttcttcttctctacaagctatgtgagtgcagactgaagttccgagttgtgatctcaagcagtctgcagaaactaacctttggcatacttggccacagccgacttctttctagtaaattcccactggttcttggcttttcttgtagaattaacacatttgcaaagttttcttcattggtattcctggtacgtggactggaatattcttcatcccttgatttgtgggatcgttttgtctttgggccacacttgtcatgggaggaaagtcacagctagactgggtatggaaagaatggaagtgtgtctcctgcagggagagcccaggttattgagacagtcttggcccgtgtttcttgaagaagacgttgggttttgttttgctcattgatggccataccccttgtgtggttggccaggaagctgaacgcttgctcccccttgtggctaaatacaggtggttctgctggcaaacccagtggtcaattactgcatctactaaggattaagaagattataaatgtaaactcagcttgaaactttttgtggcttagaggtaaagcaagaaaataattaagataacaactcacatgctgagggtgtttcatgtgttattattgtggatgttaataacaattttggctctctgtgggaagccatttccttcacttaatcagttggcaaagaaagtacatcagggaagattgttcaccctgagccgagaaagtggagtttcaagtaagaaccctgctccgcatcctgccactgagttgagatcatctatttgatttagctactgataaagtgtttttaattacaaattgtctgcttgcttggggactgacacaaacacttgttttgttttcaaagtgccttctctccccagtgttgggtttggagtagagcaagagtaacacagaggttgcagtcagtgtcttccagcgattttcattttgtttgatatgcggggaacctgatgctgatgaaagggaggaacccaggagctactgactgtgactacagtggatattcacaaaagaaggacctcagtacagttccaagtagtgagaggttgatggattaggacagatttaagtaaaacttaacaggtttaaggtcaaagaaaagtgaagcaacattccagaaggacccagaaaagccgagcaagtcaggcactgagatcttgggattgagaggagttgctggttcagacccagcactgttctggaactttcttttgggtactctttttttgtttcatcgattcctttaaaaggtacaatccagaactgaacatgtcattccacaagtggcccaaccagtgttgtatacactgactggacaggttttgccactaaaatggaataatagtctggttttcctaattccaggaaaggaaaatcaaggaatagatacattttttaaaaaagcatttaaagaatttctcctgtagacattatcttaaacttttggtccctgccattgtatgtgtatcttgaatccaagggtaatacgatacgcagtctggcaaaagcagtcattttaaatgattgagcaatatttagtgactttcaaagagcagagagcacaacttggctaccatagaagctccaccatgatgggcgcagggtttcctctaggctggaagttgtgttctggttatcttgtgagagaaatgcatcctgtgtgatttatgtggattcatttattcttagaggaaatcagacaaaaaccatattgtaaggcccaacccatctaaaaagacaatagaaatgagttctgtgtgtttttcagcagggcctcatgggcaccactcgtaagtccagaatctcttccaagaacaggaagtttctggagggcagtggagaaggggagtgagggctcagctctgtgaggtcgaggtgggtgtgaggaccagcaccagtggggagtgggtttattagctgggaaaggccataaggatgaggaagagaagcttgtgtttgagaggataacagggaggaaaagtcgccgagcccagagtgtgtattcactgcctgtcctttggaggcagccgcttccacctcttttgactgattcttccaactcgtatcctccagtctccaaaacatgattgtggtgcagctgcttgaattttcaaacttgatttccattttagaagttaaggatttgtttttttttccaaccacataccctgtcgctaccacatcaaatacaggtctctcatactgttggtcagctccgttttccgtgttgacctctgatactctgtaaacactcttgacacgtaagctgggtggtttatataccaccattacttttcctgcccagctttgtctttttcttccttgtattttatttgtaaagattccccagctcgtccccagttgtgtcagcctcttttcagtgtgctcagacccattaggtataaggcctatccatgttcctgaggaagtctggcccagagccgtccaggtggtctgacctgggcagggccccgggtctgccatcacccagcccatgctctcctgccgccccactgaagacttccttcacctctcttggacgttagggtttctctttgatggctcctctctttttctgggtttctgatattttctggttgagtggtgctactttcttctaacctatttttatttcattaaataaataggattcactaaatggatttcatacccatgggttgtatgatttgcactttgaaaggcactgggctagatgaccactttgagtgatgctgaggcattgctgggtgacttccttctttccttcttccctcccctcctcctcttccctcccctcctcctcttccctcccctcctcctctttcctcccctcctcctctttcctcatgaagcatgtgcacaggtgcatccctgatgctttgatcaggtatggcctgaaagacaagccattttagttagtttttggatacattacgaagtaatgtgggaagtaagcatcttcacctgtccctcttccctccttggctgagggacagtgtcctagtcagttccatgtgctgtgacagagtaccataggctgggtggcttaaacaaaaaacacttaatgctcacagttttggaggctgggaagtccatgatcaaagtactggcatatctggtctggtggggacctgcttcctggtctgcagatggccgtcaccttgttatatccttacatgatgagagagagagaaagcaagctctgttgtgccttttataagagcactaatttcattcacaagggcgccatcctcatgacctgatcacctcgtaaaggctccaccttccaataccgccatcttggggattaggatttcaacacatgaattttagggggacgcaaacattcagtccctgacagggttaggcactgtgtggctggcaatcaccaggatgcctggagccctgccgggaccacgctggctcatttcagccaccctggatgaatcatccagcctaaggcccatgcctggacattctgggtcctcagtgccttgcctttattttacctgatataatccttcaaacgaaaatgctcgtacttatttttgatcacttaatatacttggccatttaacaatacagattaaacttgtgttattctgttagaaaactgagagattgttttctgtagtctttgactgcatgcatagtctagggctggactggggaggagaggataatttggccacaataggattccttattatctgtctcttccctcccaacccctcccccgacccccgccccatacaggagaccctcagatacatttctgtcagtaccctcagttacatattttgggagacgtaatacttaatgaaccaaaactctgttttgctggcagggaaaaaaattgggctgatacaatcaagataatcctatcaactttaggattattaggaatgttgataatcctatcaacattctatcaactctgtaatcagaaaaatatatttaaaataatgcgtgtttgttaaaaataaccaaacaaaatacagaaaaaagcaaagtaaaaattgacaatcccctaactccagtgttggtagttagggacagaagaagggtggaggatgtcttttgtctgtgttacatgattacagcaaaagtcactcttcattctggtagagccatagaaatctggccgagcagaggcagctgtgcctgaggagcctgacttcgaatcagctgtgttcatctttgctaacctcccaaagggaggaagctcaggaaaccaccgtagaaccccctaaaaggggagggtggctacagctgagcaggtgggggcaggcaggagtggagagaggcgaggatgatgagtcaggcaggtgagatggaggctttgtaggttatgttaaggctcctagacttagcatttcaagcagggatgtgacctgatcagatttatattttgcttgcattgctgatggacattggttcagtgctcattgtactggaagggtcaagaatagaggcagggacccaaatttagggggcttcccagggaatccaggggagaggtgttgtggcctggactagatttggaacatccagaaggggactggagcaatgacatacctatacctagtcccagagggccccgatctagctaaggacagagcgtgcagtcttgcagctgctgggctgatgacatgctggggagtgtatacctgggaaattctggtacagagataaaggaaatgctcaagcctccacctatgaatttgcccggtgattaaaatcatacttcctaagctttatagaagccctctgtttgtcccacaaagggccactagcacaaggaaatacataatgtgttcccttgtcattttataaaaatgtagactggtgctgcctgctgtgaaaatgccagtcaggttgcttccttcatagtaatcggtggattcttttgtccatttctgagtggaggattagccctctgtttgccccacaaagggccaccagcacgaggaaatacatagtgtgtccccttgtcattttataaaaatgtagactggtgctgcctgctgtgaaaatgccaatcaggttgcttcctttatagtaatgagtggattcttttgtccatttctgagtggaggattcctttccataacgtggtgtatttgcagtgtttctctcagaggaggagtgcctttctggtgtcatctgtcctgttggtggcagagttctgctgctgaattaaacctttgtgtcggccttggccactcttatggctctgctggaggtaaagccagtggagtggccttgtggcatttgctccaagttgttgctcatttttctgagattatcagaggccttagagggaagcattgaggatttcattatgctccgataactatcacgttgtcaataatatggttctgataagagtgatgggggatggtggggttttgtgagttgacagacgtgggtttgagacccagctctccagtcagaagccagcgccaggcctgtttctcttctctgagttttagtgtcctcaggtggaggggaggataatattaataacaccttcctgatgtggctccactgggctggccacgccatgggcacccagcacggggtggctgccctggttcgtgttaaccatcagcagggttggagagctccctccttactggtgttggaggtcattacctggcgggggatgtggtagataaagcaccttttattgtccctacacaaggcaactatggggtaacacaatataagttattcagattagagaaaatatgaactcttgctacagtgttactgcagacaggcacatatggtttgttaggatgacatttaaaaaaagtcattttgagttacagaataaaatcaaacaaaattcctttaatcaccagggctgggatggaaataaggcaaaatgttgattcctttgaaagacaatttttgggttttttttgttttttttaaaaaaactttatgtgttgatggtttactctggtctagtcgttcctactcctattctgaaagcaggccttgaattcctgattgtgtacaggattgtgtacaaacaatcaggaattcatcattcatatgaagaagttctgtttttccctctagtgtcatgaatattttcatgtacgtatatgttatgtgactagtgttaagaatgcatgtattatatatgtgcatgcgtctcatttacattgaatgtagctaaaaggaatatttgaaaagtataccttgcctgtctccaatttctacatttcaagttaaaaatgggaaataatcttagaatccatgcctgtggttcataagcctggctcagctcttgcattcccagctactgtctgacgaaactcacaggagctgtgaaaacaacgctgttttgtgaaagccaagtaggagcttagggtcatggcaaacttcagagaaatgtaaaggagcaggcactgtgggttttgtctaccccacccccccgaccccaccgccttccaaaatttctttctttttttttttttttttttttttgagacagagtctcgctctgtcacccaggctggagtgcagtggcgtgatctggggtcactgcaagctccacctcctgggttcacgccattctcctgcctcagcctcccgagtagctgggactacaggcacccgccaccacgcccggctaatttttttttattttttgtagagacgggatttcactgtgttagcccgtacggtctcgatcttttgacatcgtgatccacctgcctcgacctcccaaagtgctgggattacaggcgtgaaccacaccgcgcccagccccaaaatttctaattgaattttaaccttccacttttaagttctgatcctgatttataaaaacctatgtaattttcttcagctttcagaaggaatgtcttgtatcttcctatgggggtgttgggggaactgatattgacagaggtcctctgacatttgatagcctggcaaatagggtcaaacatgttccagacctcagaggattgctgaggatagctttctacttaagctagataaaagaagttttgggaatcttaccttgcactctgttttgtagaaacaactgtgtttaatatatttctcattactggctgaatgacctgtatgtgttcaggagatctctctatttaccattttaatgccacatatttaatgagcattcaggcccagactgtgaagactctggaaatgagaattttgtttcctatctcctgtgctgtaacaaaagcagcttaaaaattgcagtgtatagacctcaccttttatcatttttttttcagatttttaaatattaatattaagggtctttatctcagatgtttgttgtttaccaggtcatcagtatctggacgctggcagggtccttagcaatggagggagggagagggggtccagcctgcatgattggatcagtgttgaacctgtcccacctgtggggaagaggcagcatgcggagcagacaggtgcctgctgcaggtcaggagagctggccccaagtcctgacttggagggaaatggtacatattaatatcctttagtgccaggtactggcgtagctagtttatatgcatcacttgagcccccttgcatcactggcatcacttcaagatagacaacaaggggaatgcacatcatatccctgttcactggcgttcactggtagggaaactgaggcttaataatgtgcccaggtacacacagctgataagtaaccctgcaccctcgatctcacagcatgacattggaatccacctcattagacagagctcagctgcctattctgtcaaaaatgttgagttgtatcagctgcagtgtctgtagtattcctagacatttctgtgattctcataagtatctttgaaagggggccatttagtttatttctgcatttctcccttatctgccgaaatgcccgcaggctctgggacaagctgtaaagctctccgtgttatgctgtgttgcaaacccagtgccagtaatgatgcagtgctatttaaagataagaaagcaagctcacagagggagagcgcagcaggatgtttatgttccagaagcataaacacatgacctgtgcccgtcccgtgttcttcgtccatgtccccagagaggccgtggatgggatggtgcaagaaacccatcaggaagcagaattaatccttcctgcgggtggtccctgtgaagaagacacagcggccggtggtgtgacagcccacagctgtcgaaggaagggagaagagagggaccgagggccagcaatagggttttacagctacgtgctaggttgtctcacatctaggaaagagaatgttcatattatatagaaatgggcattttccctgtggcctgatatgaggtatccagaatattcctttaggtattattaagtcataggtttctgttttgatagaaacagcaggtggttcagttagtatttttgttgttgtaatagtagcttagatctcttgtttttgttttctttggccaagacagaaaacattctgccacacacattacttcatgactctggttatatattgagagcagcattaaaaaaaaaaaaaagtccaatttagtccattaggccattcttgcattggtataaagaaacacctgagactaggtaatttataaagaaaagaagtttaattggttcttggctctgcacgctgtactggatgatacaggatgcatgatgctgacatctgctcggctactggggaggcctcaggaagcttctaatcatggtggaagatgaagggggagcaggcatctcacgtggccagagcaggagcaaggggttgggtcacacacttttaaacaaccagatctcatgagaactcaccattgccagaacagcaccaagccatgagggatccacccccatgacccaaacacttcccaccaagccccacctccaacaccggggattattgtcaacatgagatttcggggacaaacatccacactatgtcgtagccttaaggggatcttacctctttgaagcattgtagagttcagagagtaggacattttgtctactgtattttaaaatactaaatgttctgattatgaaagtcagtcctggaaaaaaaaaacaaacaaacctgaaaccatagatgaagataaggaacaaaataaaaattacccacagtctccctcgcgtgtaccgcacagttcatgttttagtgtgtctacacaccatttaatgcaggtggacagactcaggggcaggtgtgccttgctactgctatgtccacagcacctggcagagtccctggtacagcataactgctcagcagttgggtgctgagtaaatattaatacatgtgcatgtggtaccagtcagggcccaacagagggacctcatgcgaggagttgctccacaggtgtggaggatgaaagaacaagttggggcgaccctgagagagcccagagacaagctctgcaggaagcaggcaccaccactgggccaggtgacctgagcccaggagccaagaggatgccctccactgctgatactacctctgcagtgggacgacatcggaccccactgccgatgctgggacggtgcttcccctccccctgaggctctcctaccagggccccctctcatcaggccccagctggaagccaactggaaagggagtcggggaagtttcatttgtgggggtccaagtgccaagggacagacaagggaagggtggatttgcagctaagaagatagtaaataaccagactacgtgacagtctgaagaatcaaatctggaatcaaattctactctgctctaatgtaaccctgtattttactgtgaataatataccgtgggtatcttccttgcttgatagatacagctccacataatttttctcaatgaaacagattctggagtaggcaacgttttcctcttttgtaaaatacaccaaattgtgaggattgaatgagataatgtcaaagtattagtactttaccctagctgattgacagtatccagtgatagtgataataagggtaattactactctagccaattttatcaaacctatggatgtttaaggaattgggttttttttttttctcctttgatgaatactcctgtaaatacatcgttgcctgcttgtctgagtctttctgtgggtttttagaagtggattacttgcagcaaagtctcctctacttaaggctctttgtatattttgcctaattgtgctctagaaatacatcaatttccagtcctccttctctcagaccacctgtccctcacattttcaccagttctgggtcttgttattctttttactctttgtcagtcaggtgattgaaaaatgtacatttttttaaaattggcatttattagtgagcttgaggatgtttttcacagtcatatggaaacagttctgcttcatgaacaagaccttggggccacatactggcttgttcacctggatgcattttctcagtctccctcagaatcatttttctccctgaaaaatgggattaaaagtattaatagtagtgcccatctcacagagtcattgcgaggattaaagagaggatgcatagatgtattgaatcagtgctgggttctggtagatgttcagctagccctagagattattagccatttgatgtgctgatcctcaggaaggtgggcgggagagacctagacgcagaaaaggagctctggagttgaggtttctagagatgaggtggtgcgtggtggcccagtccagcatggctctgggtgtgagcacaacataggcagatgtgtctggggctcagggagtcatttgtggattgagggtgctatgtgggtgtggaccacggtgatccaggatgatgcaggatttgggccggggaggaagatggcaacccaggttccatgccatctttaaagaggggatggttactagggtgtccagcgaccagccaagtggcctatagataataaggaggactcttcatgacatggaggctgaggtggaaagtcccagagtagggttcagccctggccctaaaaagtgccggagaacctgtagcctcctggaagctgtgctgtgtgcagagccaagcttcagtgtgacaaggaatggtgggagcaatttggagaagaatgaagacttggtgcagtggctagggaggcaggcagggtgaggatgtggaagggtgcagagctgctcaaggtcagcttcctgagcctgcggtgtggtcccttgctccacactcagaagggccctgtgtttgatttaatgctcttttcttgccatcttgaaattcttgatagtttttgaacaagggatccatgttttcattttgcgctgggcctggaaattacgttgctggtgctgaggggatgtgcagagcagaggtgggcagagaactgacgagaaggacacgtgggtaagggtgggatgagctggcctcaggactccgagcagagctcatgtaaaggtgtcgggcccaggatgcgttctcaggctggggtgggaggcctgatgatggcagatttctctggattacaaatagaatatgtagcagggtggttcatagctttgtgtgtctgtgtgtgcattggtaaatttttattttgaaactaaaattatttcaaaattagagaaaggctgtgagagtgcggttgagctggtgttggctctggaacagggtttcccaatgcaggcggcactggtaactatgtgccttgggtcattctttgttgtgggggctgtcctgtgccccatgggatgttccctgcacccctggcctctgccttctagatgctggggggcactttccctggtgtaatattaaaaaaaactctccacgttgccacatttggggggcagaatcaccccctccccaaattgagaagctatgttattggaacacagtgtcctgtattttgtctagcctctgctgcttagagctgcctgagcttggagaagatacttgttctctttccaaagcttcactgtccctttctgtacattgtcaggacggctgttaataccactgctctaaatgtgctcagttttgcataaacatcagctaatgttaaaattttaatctctgctaatataagaggcatcgaagtacacgcgagttcagtttgcatatggtgaggagggagacggcctcatatcgtatgtgtgtatttgccgattctatattttgaggttgattcctgttgtcttttgttcagttgtctcattctgttttcttttggggctttgaatgcccttttcatgcctgtgacctctctttactatgccttttcttctctgccagcaaatctcatccattcttccagggcaccttactgtcccccaaagccccagtgactgctctgtccacagggcttggtttctgtgctctggctctgcaatgcaatgcagaaggggctgggctcggaatggggttgctggtcaggccatgtgcccaggggaaggacacaggactcaaggagtccacccctctctcccccccttttttttttggtcactgaaatattttctttccaattctactagtcctgctagagctgccataacaaaatacccaattggtgacttcaacaacagaaattgattccacactgttcttttttttttttttctttttgagatggagtcttgctctgtctcccaggcaggaatgcagtggtgtgatcttggctcactgcaacctctgtttcccaggtttgagcagttctcctgcctcagcctcccgagtagctgggactacaggcacatgcactgtgtctggctactttttatattttttagtagagatggggtttcaccatgttggtcaggccggtctcgaactcctgacctcaagttatctgcctgcctcagcctcccaaagtgctgggattacagacgtgagccacttcgcctggccatgatcccgcacagttctgaaggccagaagccaagatcaggagaccagtggattgtttctcccgaggcctctgttcttggcttgcaggtggccccttgctgtgccctcacatggcctttgccctgcgtacatccgaagccccagtgtctctctgtgtgtccaaatttcctcttcttagaaggatgccggtcatattggattagggcccacccgtgtgacctcattttaccttaataacctctttcaagtttctgtctccaaatacagtcacattccaggggctagagcctcaacatggaagttttggagggagacacacttctacccataacaccaatgtcatattaagctttatggaagaatagaccaatatgtggtgggttcaagaatcttttcttagaagaaaagtgaatctgtatatttgatactttatgatttccttatttgctctaagcagttggtaagaatctcagtgtcacttggctgaatgatacactactggtgcctccagacctatgaggagcctaatatttttgtcttggttgaaacaatgcaaatcctgggttttggagatgctcacagccagctgtctgattacgtaaactgaaagtggcagagaggaagcttttgcgtggggaaaacatgaaatatacaagggttcctttaaaacagagtgtacttctgaacatttactgaaggtggagggccctggacacctgatgttatcttatgtggcgttatctgggtcagatttcattgcatttcctgaagaggtaacttggcagtcctgggagaggctggaccttggtgtccaggtggcaggttcataagacacctgtgatttgatgtgagccagtcacagaggaagccatttccagagaggaacaaccgtgtagactgctttcctgggagtcaagttaaaacttctctcctgtgaccttgtcacccggcagtggaaagttacccttggctgcagccacgacttccgcatactcttcagaacttgctctgcccttgagttttccagctttcctttaatgcactaaacctttaatattgtattctcctaaatgagacgtctcgcatttgagcangtaacactcggtaagactttgcttggtgggggaggaggttttaccttcctgtggcattctgaagctctccacatccacccatagtcatgattgtgttatatgacctcaagatgctggagctgttaattcatctttaacataattgacctgattacttctttcttgaaggattttgttcaaacctcagggtttatttaggaacaagtctaaccaggcctgattggttttcctaagtggagatacagctttgggaaacaaattaagaaaatgaatggattgaaaatgtaggaacaccgtgacagttgtgaatttttcttattgagggaaaaaatgggtatctgtgaatatttctcttacactatatagtgagaaatgacactctgctgtggatggtaatttatttctgtgtaattgcctgagtaaggctttctctgatattgaatactgagtagaactcttaggttatttttggaagaattatggattttctcttaggttttagaatattttttgtttgcctgttaagagaatttgatgaagatttcaatgtaattaaccaaataaaatggcattctgtatcctgggaagggacgatgtctttcagttctaaatcaatgcatcatttacctcctatctctcttgctggccgagccatcaatcctgtttttattaaatgttgttgttattgttttgagacggagtttcactcttgttgcctaggctggagtgcaatggcataatctcggcccactgcaacctccgcctcctgggttcaagcaattctcctgcctcagcctcctgagtagctgggactacaggcatgcgccaccacacctgactaattttagtagttacagggtttctccatgttggtcaggctggtctcgagctcccgacctcaggtgatccgcctgccttggcctcccaaagtgctgggattacaggcgtgagccactgcacccggccgttttttgataaattttaaacttctggtttgaaacttttgtttcctgtgcttaaaaggagacagttaaaagcactctgatttggactgacagaatgttttttagatgttagatagatctagctttgaatatttatttgcagagaagtagcagggaggactaggaatgactttttcttaggaggtgctatgcattccatcaggtgactgacccctttgtgagctgtagtggtcagtcccagcatggcccacacttgttggctgtcttagccatggtggctgtggttggcgggtacccagccaagggttttccatactgggggccttggtccagtgggggcgggtcgtaccatgacccccttctcctgtgatcttgcctcactggcccaggtaaattggtggacgtccttgactcctccacctccaaaaggactttgaactttggcactgttgggagtttaggctacacctcaaccaggcagagattgggatctaacctacttttaaaagccctctacagggaatttcataactttcctgagtgttaggttttggtgattaacagccttgactttttggagcccttcctttgccaaacatgcattcctcaggtgctcacttaaaatgattcttcacaatatgcctatagacgggtctgtctggtacagcatcctggagtggtgtcaagggaaagaaacatgctgcttctgccacagacggaccatgcatgggaagaaactatttgagaatggctctccaaggggctggtcggccttgtctgcccactccctctacctttctttgttctgtttctttctcttcagtgttggtccattttccttttttcactgttgcgtgttagcacatcattactcttatctccatatatttggatgtttcctgcattatggtgagcttcagtaggtcttggatgagttagttgttctcattccaaaatgtaaatttctggtgtttagtaggtgctcagtaaagcttgagaaagatgaaagtgagagcccagaactagtataaaaatacggataccaccatagcatggtaattaaaggggtgattgtgaagatgaggtagctgtgcctggatgtgtgtgtgtgtgtgtgtgtgtgtgtgtgtgtgtgtgtgtgttggctggagaaggcttaccagtggtgctggacatgtcgggtagagtgttaatagtaacttaattgactgaatttggaaataatctatggggttagagagcaaggaggtagctgtgtaagaggatggggtcggtgaggtggggtggtgtgagcaatggagctcaagggctcaaggtgcaggcctggactgatggccactaggaccaccccaatggcttcagggtcaggacaggaagggaatgtgattattgcagcaggtagtagggcagtatgagtgtattattcatatatgtgtgatgaaatggagcatcaaataatatatcccataggatagaaaggcacagtgagtgagtttgggttaaaaattcgatgagataaagtggttgtacctcctatgaaaacaatttaatttcttattatgaaggcattactcatgttcttcagaaaaattaaaaaaaaaaactcagtcattatagacaattgtactcaagatgaaaacaccctgtactgtcgcaaccctgaagcacctctgttaatatgtgtgtgtcttctcacggggtgattcttgatcagagttactgaaacagcaaggcttgggaacaagaggcatgagagcaacactcaggacctgttcagttttctgcacagttccaggtgctcttccagcattgctggctccgagagagtcaaatattcagagcttgcaagctggggaggaaaggggttagggtggagataaagatctgggagatctacagatacggatcatctgcatttggaaattttgtttgcccttctcacacatttccatccaagttttctttggggaagaggggatccctgcagaggagtccagttgcaaatgtgaaatcttaaaaatgtatgtaaatagcatctttcattccgtgatacttgtttgtttgaatagaacattgttaaattttattgtgcttcagaatcatctgggtgcttacaaacatagattgctggactctggttctggagattcggattctggaagtctgaagtggggcttgggaatctccatttcttccaagttgccaggtgatgctgatgctggtagtcgggagtccgtactttgagaaccactcttctacctaccaagacttccaaaaaattggtactctgggaagatgccctgtgccagtcctgtggcttcttaggcacctcttccagcatagactcctgcagagaacctggtacctgcaagtacctagtacctgcaagtacctgcaagtccagtgtgggaaatctcatgacaggcatcaacattccgtgacggttgacagccacctatggggtggctgatgccttttctgtgtcttcagggctttaggggaaggagagtctaaatgagtggttctaggttgtgggaagagcctggctttgatgttcagacacctggcctcaggctgcatcgcccatacttcctgtggaatggttatcatgagtcctgttgtcctgtaggtgaatcattgattcctgtctttgcataacctctcacttgatgataatttttttttaaaaaaatgactcttggaaacagaacacacagtttgtaaagggacctacagtacagcagaagctttgtggaaggatacaaaatgtgagggactgtagtcgaagagatttaaattggaagtgggaagagattgactttttttttttttttttttttaaagacagagtcttgccctgtggtccaggctagagtgcagtggcacaatcttggctcactgcaacctccgcctcccaggttccagcggttctcctgcctcagcctcccgagtagctgggattacatgcatgagccaccaggcccagctaatttttctatttttagtagatatggggtttcaccatgttggccaggctggtctcgcaaactcctgacttcaggtgatctgctttgtgtctcttagggagcatgtttgaagagtcaaaggaaaaccaagtctgttagctttgcgaaacgtttttttttttgagatggagtctcgctctgtcccccaggctggagtgccgtggcgcaatctcggctcactgcaagctctgcctcgtgggttcacgctgttctcctgactcagcctcctgagtagctgggagtacaggcgcccgccaccacgcctggcaagtttttctggaatttttagtagagacggggtttcaccatgttagccaggatggtctctatctcctgaccttgtgatctgccctacttggcctccaaaatgctgggattacaggcgtgagtcaccgcacccggcccgaaatattgttaaaaccaagtacctttgtgaaacattgttacaaaaaccaagtaccaagtgtgtggcattaaagtcaaacattaatttcaagttacagaaagaaatagcactgagtagaggttgatcgataaaaaatgaataaaatattcaacagaaactccttaaaaataatgtgagaaatggacatgtgacatgggcgtttaaaaagtctgtaaggccaagaaaagtttcctgaaaggaacactgtgcccaggcagtcctggctttgcaggattccctgataaccgagctcaggcatcctgcagagtgagtactgcccagatagaaccttctgcctctttggggtaaaattcgatttcaaagagagagaactgtggggtgagaaaggaagactgggacccaaggggccaaactagtgacaatgactgctgtcatgaagggtgacaaggacaatacctgctgagctcaaaccaccctttggacccagtgaagctcagatgttgcttccagtgcaggagtagttaagctcaactgttttacaatatccagttatttggctgggtgtgatggctcacacccacactcctagcactttgggaggccaaggtgggtggattgcctgagctcaggagttcgagaccagcctgggcaacatggcaaaaccccatctctactaaaaatacaaaaaattagccagacgtgatggcaggcgcctgtaatcccagctacttgggaggctgaggcacgagaatcgcttgaacccagggaggcggaggttgtagtgatccaagatcatgccgttgcactccagcctgagtgacaagagtgagacttcgtctctaaataaataaataagtagcaaaaacaatccagttattcctcaaatatttatgagcacctcttaatgtttcagatactattgtgacaagagaaaaatgtgtttgtatatgtaaatagaaaaacaaaagtgatgtggaagcgattacttctgtcattttggaactaccttcctcccatattaagtccatattatgacaattcaaaaataatcaaacttcgtaagatattacctgtgaaaggaataagtatttaaaaatgtattttagatggccttttagaaatctagtccgtggacacaatctagcatcatgcagttgccttcaaaaagaatatcctaaagttcttgtttgttttctttttcctttcaaagtgttctgttgaaaataacccatttgtcattttagttttgatatgacttagttatacatgccttttgaagcagtacccacccacatagtaattgcgactatcttgtgttttgaaaaaaaaaaagcgagacaatttgactttgatagttttaagtttaaaaaaaaaaaaaaacgctccaagttagactcagatgaaatcctttgatcttaggtattttatgaggaaactggaaaaaataatttcacaaatttctattttgctttataaaaattttatgattcataacacagggaaaatccagtaagctaaggcgttttttagttgtttatcttgctagtgagtctttgatgtgagttatttctttgcagtaaggtggcatggatgggtgatgaggctaagctgaaaagttaaatctcataatggacatttgcaccctttaaggaagtaaagctctcaaagcatgattatggccaagatgaggccggtggcatgtttgtctcctaaatgtgcagccaggaatctcgacggtttgtctgaggtatgcaggtgcctggtagataaattagggtgagcatcattcatggcgtgtggtcagttgcaggccttcagccacagggatgacagaagggaagtgaggaatcagggatgggtttgaactgcggcgttgctttgggagtctctagacatgatcagttgcacatgtactgttctccttgtcaccctcaggatctactgtcctgtggttgaagcctgcagctctcccaagttggtggcactgggcttcctgacttctcgatgtctaatgagacagtggaattctacttgcagccccactgcaggccaggtttatctctcctctgtcttcccagctggtgatttggtttctcagtgctgttttgggtgcacttttgtggaggattcaagctggtccttagccactccttgaaccagaacctcttttactttcttatgtagttcttctcttcctgtttttatatcctaaaactagtccagcgaccagcccatcgtagtagaagcgttggtgttcttcctaaaaggaattgtaaacatctcttggagagtgggttagccaccataaattgttttgggacttcggatacccccttccgcaaatgctatctagagatgctttaatttcatttcaattggttattgcatccctgatattttgaaactgttatgagtagaaaacattctggtttatgaacaatctgcttttcactatgaaatagatgggaattgtaattattcctgcgctttgtcttagagaagttacatgcatgcatcaagtgttgtgtgatcttgtgcagttcttcttagattgagtttttggctcctcgtgtgcaggccttctaaaatcacaatgtccctgagttgggaaggaacatcaggggctatctggttcattatcctaccccccaccgcctcccacgccccacatttctggcagcctacgagtctttggtccctccccagtgctacctggccagctctcagccttgggaggccacctgcccgtgtttgacctgggttaatgaccgccagttcctttcccttaatacgactcatctgctctcctgcatgctcgctccttgggtgagagctgccctctgcaacctcataacggaaaatggcttgacttctgccacctcctcctccttcccatgaaagaatctggtcttttctatctctctattatttttaaaaccagattaggttggttgtggtggctcacacctgtaaaaatcccagcaccttgggaggcagaggtgggcagatctcttgagccccaggagtttgagaccaacttgggcaacatggggaaatctctaccaaaaaaatacaggaaaaaaaaaaaaatagctgggtatggtagcacacacctgtagtcccagctacttgggaggctaaggtgggaggattgcttgagcctgggaggtcaaagctgcagtgagccttaatcactccagtgcactccagccggggcaacagctagaccttgtctcaaaaaaaaaaaaaaaagaaaaataagaaaaagaaaccagattaaacattcctaagtaattctttttgtgacttttgcctgtttattaactatcctggctacttaaaatgaatttttgagttatgaatacatttagatggttttaaattcaaagaagtctcttttttctcagtcacttccatccccagccaaacagttcttatccccagagtcagccagtgttaccagtttcttgtgtccatgcagtttgctttatgcatttacgtaagcaaatattcgtacacacacacacagcctttctatcttatggaaagttatttcagtggcacatgtaagtatctcagcatctcttgattgtcattctttttggattttttttttaaatttcatacttacaaatgatcatgtatcttaagttttctgaagtagccttggtttcgcattttgactgtatttattatggtatcaggttccatatttcttaaaagtaatactgctgctgcacttacattgaacaagtcaccaagctctgttaattttgcctgaaaaatgccactgctttgacatgatagaaaacacaggcaatagtctttatttctcactgctgtttttttcttattttgaagaatcaccctaatacataggaaaatctcgacttagcaaagagataaatgagactgtaattattgcattgggtttttcacaatgtatgttagttatctattgctacataacaaattagttttagagttagcagcttataaagcaacagatatttattatctcacagtttctgtgggtcagtaaatcaaaagtggcttaactgggtggttctgacatgtgcctttccacagtgactggtatgtagcaggcaagggtctcttatgatcctgagtgaggatgtcagccaaggctgctgtcatctgaaggcttgactggaacagaaggacccatttctaaaatgagtcactcacatggctggaggcaagaggcctcagttccttatcgcagagattgctccttggggctgactgagtgtctgcacatcatagcaacagctggctttccccagagggaatgatccaaaagagaggtggaagcctaatgtctttgtgacctaatctccaaagtcacacactgtcacctcttccatattctattagaaaggagtcactaaatcagatacccatgggaaattacccacctcatgaagaaagaaatatcgagaatttgtggacctgtttcacaaccacacagcatcattttttgaaggtagagtcaccttgagcatttaaattagggttctgctctagaagtctatccctttattttttcccatttgttaaccctttttctacttggcataatagcagccattacccagtagaagttgagagatttaggttgcacagaatcccacagtcttttcagaaactcatatccttagggtgtctgcttgttgacagcattgtagaattgaaacttgaccacgtgttatgtgttgggctgccagtggtgatcagagatgacggtgagtagtccgttgagttagggctgtttgcctctgtcggtgtcatctgggtttgaactggacttgcagtcctggtgggctgctttcatttccaccctgggtctttgttctcaccactcacatcttacgcctctgttccaccgctgtgtaagaggcaactgtgcacacaccttgcctctgccattgactgtaagctcctgagagagagagagaatgtgtctggttcagttttgtggccctcctttttgctagcataatgcattgaacatagtatcattctgcatttttgttgagtgtataattagatggtcaatgtggagaactcagagggattttaggagggggtggcagcaatataaggttgtgggacccaacattaagagagggaaaggtgtagcgggaaggcgttggtgtggggagggagaaagtcaagaggattcaacctggcaagagttggaagtgacaggaaggtgtgtggggtggggacgcaataggacagtgtgtgagattttttaaaaaatgcaggcaggggagggatgagtaggcagagcaccgaggatttttaggacagtggaaatgctctgtatgatactataatgggggatacatgtcattatacatttgtccaaactcaaggagtgtacaacaccaagagtgagccctaaggtaaacgatgggcttcgggtgatttcgatgtgtgaattgtaacagggatactactctggagcaggatgttgatcatgggggaggctgtgagtgtgtcgcggtagggggtacgtaggaaatctccgtgccttctgctcaattttgctgtgaccctaaaactgctctaaaaagagtagtcttaaaaatgcatgaaataggatcctgtctcaggactggggcaagagcaggtagaaatggaaagagtgactgtggctgctgtgtagcaggcacacaatggtcatggtccatatgctggcttagttattttttaaagcaactaaagttaagtaatgtatacttaacttacatatttatgtggtccaaaaaacgttggtcatctgttttaatgcagagagtgtttaccctaagcctgcaaatgtgatgggtaatagctagaactagaaaagtactttagaatatggaaggtaaatacatgaattaatttaggtaagagtgacaaaacaggggaagtccctgacttagaacttattgtccgcttggacagctggtgtacgtgatcctggggtcacagtggctccctgtgcaggaagaacactatttcccagctcagataccatctttttaggagagtacctgccattgtggaaaataaggataaaggataacaagttacctccttaagacaaagtcataggagaaatggtaaattccagtatcttgagttttgagttggaacttgaaatttattttactacaagaacactgttgatggattatgtattttatagactttgtgggtggctatgggactctagtaactgcttatgcacagtttatatgagtagggctgctggatttccagatgacgctctcgcaactgaaccttcagattaccacctgtttctcagtttggacactattagtgtgctgctgtcacttatggctcgggcaccttatcttgttttatgtcttgatgaagaagtacaaaattcagtgtaaaagaaaaacatatgtaaagcttatagaatcaccccgttacacaataacaatgcagaacaatagattaataacaggaagagatgctgaaacttctcttcagcctagtttctactctgatgtttcttctctgcattgtacagccaatctatgaataatattttcattgtctaagcaaagccaccttagctaaatatttaattctactggagtcataaacagggttcaaaatatcacacatagattttatgaaagtaataaaatgcttcagaaagtacagtggctcagcctggggccactgcatctgataatttggttacacaccttgtcatgtgcttcctaaaagaatgacgatggttgcttatctgtgtttaagcttgtcattttgaggaaacaaagataagacatttttgctgtgtctctaaaatgcatgtgtaaactatttttatagagtaatgcttcagagaggagtaaaatttcctgcaacaggtgcttgtaaacagtaattgctcagtaaaggtcacctcccagctgttgcctacatgttacataagagaaccccttcacgtcttccgtatttgcagctctgtacctttgtgagtcacctaaaaaataactcatagggttgtttttctttctttcttttttttttctttgagacagggtctcactctgtcgcccaggctggagtgcaatggtgcgatcccggctcactgcaacctccgcctcctgggttcaagcgattctcctgcctccattctcctgcctcagcctcctgagtagctgggactactggcatgcatcagcacgtccagctagttttatatttttagtagagacagggttttcaccatgttggtcaggctggtcttgaactcctgacctcaagtgatccacccatcttggcctcccaaagtgctgggattacaggcatgagccaccgtacccggcaggtttgtttttcttatgacaaaatcaagcctggatggtgtcgttaacggtgaagttaaaatttttcttttgctttccttaatatttccgtgtttttttctttttctttttttttttttttaacaaaagtctggtttctaaaccaaaatatttaatgcttcaaaaggaaaaaaatgtaagtcagtccaaagaaatgattcattttgcagaggtaattactactaacatcaacctttccaggtctttttctatgcagctatatcattgacatttttttaaaaatgagattacattgtactggagggtagactgctataacaacttttggttttggatgggaataaacagaaaaagtctcatctccagttcatttctggggagggtcaggaggtggggggtgcttggctctactcccttcgtatgattttcccttctttatctccaggatcttccccatttcacggagagacatggatgagaatgaaggctgctgagtgggaggggcttatggggccagttttgaagaggcctcataccttttggccacattccattggccagaactttgtcatatgactgcacctaactacaaggaagactgggaaatgtagtcaagttgcatgtccgggtagaaaagggacacttttctgtggaatagctagcatgtttgtaactcaattttataaaccattttgaaacttttcttaaaaaaagcttatttcagacacatttttatatgctggatctgctcacctctccatctctatcttattaaaagttcttgccagaatctctctccaattgttctccctccttctgccctgttccctcacagcagccacagtggttctttcaaagactgaagctacattttatcactcgcctgcttaaaactttacagtgcttctcccccagtggtcgggataatgttcaccctctcctgaagctggcctctgtggtccttgaccccatcaggtcccacggtgccctgcatggactctgccatccttcaccagcttccccccatcaaacggggcttgctgtcagctcttcctgcaactcccagccctgccgcaccactcagccttcttccttcaggcttcagctccagtgtcttttcgccaaagaagcctttcctgatctctcagccataaatgttcctctccccagttgctttttccctctccctctactcagttgctttatttaactgtcatattgtctttggagcacttgccaccatcagaaattatcttgcattatgtatttatagtctgtcttccgcctactagatggtgggttgcttgaggcaggaactctgtcttgtttacatctctatctccagataacgtgtctggcacgtgatgggtactcagtaaatacttgtggaataaagaaatgtcattacaggttctctatgcattaaaattttttagaaatggggtgttgcagccgggcgcagtggctcacgcctgtaatcccagcactttgggagactgaggctggtgtatcacctgaggtcaggagttcaagaccagcctgggcaacatggtgaaaccccatctctactaaaaattcaaaaattagctgggcatggtggcacacacctgtaatctcagctacttgggaggctgacgcagaagaatcacttgaacctgggaggcagaggttgcagtgagctgagatcccgccactgcactccaccttgggtgatagagtaagactctgtctcaaaaaaaagaaaaaaaaaaaaagaaatggggtgttgctatgttgcccaggctagagtgcagtagctttccacaggcttgatcgtagcgcactgcagccttgagctcctggactcaagtgatcctcctgcttcagcacctccccgagtaagtggtactataggtacttcaggttttgaagcatgtgtaaaaaatactctagcagggacatcatttgagctgagcaggccatggaggcatcaaatgattagcagtagggtacaacttgttgtgagaaccagaaaagagccttggcctacataacatcctgtgctaaagaaagaaccctgactcccagcctgtgagtgttccagagatgggcagagcagtccctgcagcgcttcagggaacagggaagagcagctaacccctgatgcttctgtaagcactttgggacgccctttgctatagtagggtattgtcttagttatccctgacttgcctggtgttactttacatcccttaatcctttcatgaagactggcaaacacattcagtcctgccaaccttgaaagtaggccatgtttgaaagaacattggcacaaacgagttgcgaacatcttctttaccatattcatgttctttaccgtattatgaggacactgtgcttgccacatgggcagtcttgttttggggatacgtggttggatggacggttgggtggatggaagactcctggaatgtgaagtatctcaaggatgtgtgtccattgcatgaatgtatgtttgatctatgcagctaattgacaaagatccaccatcctgtaccctccatgttttatttttgccctgccattgttctcttcgacattctataatcatcaaggttttcttgccctcacctaggtcttgactaaacatgttgggtaaatgaatttcatattactactttcttgcgccgtcagccattgtgttcttggggactccatcctgagccttttttttttttttgagaccgagtctcaaaaacagtgaaggcaggtgactggtgaggagagttccagccactggattctccctcagtcccctgtgctgtggcccttggtgacccctagatttcagtgcccctgcctgacactggagtccctctgtaaagaagcccctttctagctagctagctgttccatcccgcacacccccacagaagccttttgctgccattagtaagcacgcctctattttctcacctgtgattgatcatgcatgattgagttttgtctattaaagcaattgataagttactaaaatggcaccaaaagaaattagaaaaaaattgttgcaaatgtcagtgaaatcttttaaaaaactgttgtactttagaagtgcctcaagtgactaatggaggcttaggactctgagtggtgtcacaaggaaccttatgcacagggacactgacattagcctgtactgtcacccaggctggagtgcagtggtgtgatcttggctcactgaaagccccacctcccaggttcagcaattctcctgcctcagcctcctgagtagctgggattataggcacatgccaccatgtctggctaaattttgtatttttagtagagacagggtttcaccatgttggccaggctggtctcgaactcctgtcctcgtgatcggcctgcctcggcctcccaaagtgctgggattacaggcataagccaccatgcctggcccctgggccattttttattcttactcttaggctaggtttctgcagaccttggttataactgcaggctctacattgataactgctgagtctctaagtcagaccagacgtttctccccatttagtgatacatgttttccatccaattgcttcatagacaccttggacacagtgctctatttcaatttatgttgacagttcatgacccaaactggaaacctgagttatcctggacttctgcctaccaccttctcctaagccatctcacctgtcctaaatgtcgtagcccttatctagttctctaagctgtcatagggtcctgtactgctgggctgcttgttgccttcaatagagcctggagcatattcatgtcggtatttcaaggccccgggcataagagcttcttaggaaatattggaatgaatgaagaaatgatgaataaatgaacaaatgaacagttgattgatttccaagacactttggggtggtttccatttagaatggtttttatttctttttactggaactaaggaattatttttgcttgttgatgccaacattttaaaagcactataattttgaaatgttttaccacattaaattcttttctattgcaggtcacatacaaatatgtcaacttcaaaggaggaattatttgttatatttatgcaaacttgtggcacttggacatttatctagatggttttttgtgtatgattgtgttcttggtacagctggaaaagctaactttaagtggcaggagtaattgatcttaatgacttactttgaattaaacttgtgcttaattaacttggatgttctaagtttctagagtcacagacttttagagctggaatattgctttttgaacttcagtgtaaggaagaattgcttatgcttgaattgatttgttctgtatcccaatactggactgagtagaaatcaattactttaatattggatgagagagtgattgattgaagatcaggtttttaacctctttttttgttctccttctcacagggagagtcccgtattctcagagtaaaagttgtttctggaattgatctcgccaaaaaggacatctttggagccaggtatgttggctttgtttttatttctgtggacttctgaaaaattgacaagcagttttcaaattcaggcacgcatcagaatcacctggaggacttcttaagacaaagctggctgggccccacctgcagggattctgatttaggaagtgatgctggcccagctggttccaggagcacattttgcacagggcttctggacttaccatcacaacagtagttaacagcctgttcttcacatgggctaatttcatgagattagcttctggtgttgtattctcagtagaaaaatacagtgtgggactatggctctgcttattttaatacttcaaaaatatttcaaacttagggaaacataaaagtgtcattttgtttctaggagaactggatattctggacatgtataatctgaattaagagatttggtgatttggggcgaatgtggtgatttctgtggcatttctagaagtaccagcagggaagcagccagatctttctgtgtgtttcagcttttttattttcagtattgcacttggatattcctgtatctttaaatcagcccttttgttcctattggctgtcagcaatgtgttgcatgaagttattggactgggagcagggtgagggtagccgtagagccacctggcactagaatttagccagattttggagaccaaagatcttttgaactttaaacctggaatggacatgagtgatgttctagtccaacttttccattttatggttgacaaagcttgaatccagaaaggttaaactacccgtgcaggtcacgtgggccagtgatgtttgaggagtgacaggaacactcctcctgcctctacccagtacattttcctttgtggcatggtggcctgaaaatactgtgaggtttaacaatgaaggcaggtgactggtgaggagagttccagccactggattctccctcagtcccctgtgctgtggcccttggtgacccctagatttcagtgcccctgcctgacactggagtccctctataaagaagcccctttctagctagctagctgttccatcccgcacacccccacagaagccttttgctgccattagtaagcacgcctctattttctcacctgtgattgatcatgcatgattgagttttgtctattaaagcaattgttaagttactaaaatggcaccaaaagaaattagaaaaaaattgttgcaaatgtcagtgaaatcttttaaaaaactgttgtacttagaagtgcctcaagtgactaatggaggcttaggactctgaatggtgtcacaaggaaccttatgcacagggacactgacatcagcctgtactgctggtaatgtcagagtgaagcaaatcccacctgaaggcactctcttgcttgaccgtgaagtcacactgagtggttcaccatgtgcctgcactcatgcaaggataagccaggtctctaggcatgggcagaaggatccctgcttcccttctcttccctttcagagcaacactttcagccatttccatgagtctgggctcttgttacccagctgaaatactgtttcctgaaactcacaaatttgctctctaccaaagcccaccttatgccctgcctttccatgaagcctgtcaagaaaattccaagaaagaaaatttgatattcctatatcaaagcgtgtgtctttcctctcctaatacctcttagctgccacagtaggtgcaatgtcattttagcttttgcagatgcattacctggtggtttcctagtatttctttcacttgcctcgattgctagattagaaatttactggggacagacatctttttaatatctttctcctactacttaacatatagagcatcaagggaaaaaaaaacaaaaattatcttttaaaaatgtaaacatttgcatgccaaccggtagtggattgtgcccttaggttaaaaatatgtattctcactctttccaatgaaatctgtagtgctgaaggagcaagttggatttagaaaattttggtgatttctttttaagcttgattgggtttttattttgttttatccaaaccctcccattaaaaaaaaaaattgattcacattgtatttctaagccagttaagtagatttaaggttgaatttgtagtggaattaggctccaaatcttagaagagcaaattcgtaccttgaatttttactgtttagataataacaggcagggtcatttctaagggacatggtggaaaggaatattcgtgatattaattagaaagataaatcgtattgtggccaagtggaccaagtgccagaaaatgcatcagaaactctgaatcctgcttctggtcttcattttcctagattgataagtaggcgcacacattcctgctttcctccctcctctgaagtgctgtagttcttcagggacacatttgccagtgggtctgagatgcaagtgtgaggtggcagtgtgggttaatgccatcttggtgtctcactctggagtggcactgcttattgccttaaaattttgccagatgacctgcattctccctccatgctatcttgggcaaatcccttaaaaccactcatgccactgtgtattagtgtacaacaaggataacagtttctttgtaactggcatgtggggaagaaccgcaaagtgacttctgtcggcagcagctctgtcgtgttttaaggtagtagtcaccgggcagaggtttggtagtgtcctctctggcagccaccgtctccttcagagccctgggccactgacatgccttttctccaagtctcttccctgagtattccccgcacctctgtgcctgatcagacacctcattctcccttggcagcaagaaggccgggtaggcattggagcccttgctgtagacaggataatgggtgaaagaggaagaacattttcatgagaggcatttcagagcctttaaagtggtagaaatcctgtagacaatgatgtttttaaaatcagggatttgcatctctgggactccaactcctttgtttccaagggaggttccctgggccacttggcctgaggttgggaaggggtcggtggttgcggggcagaatgtgatgcttggggatgcaggatggtcaggggcgggtgacggtgggaggagtggagcacgtcatctctccttgcccttccgaggtggtgatggaagctgcctacagctccagctcagaggccgggggtttctggggcccttggtgtggggcctctctcctagctggaggtggccccttcccccttgagaggcctgtgcctgaaatgcccttgtccttttcggccgtctcggccccagtccagtacttaggatccaagatcattttcagctccttccagccaagtctcactttattaaaggagctttgttcggagcagattggataaccgagccgtgactccacttgaacatctgagcagttggcccgcgtgggaaacagcaatggcagagaaagatgcttccctttggatcataccttgaggacaaaaaagggcagtcatataatctgtcatctaaactgggacgcttttgtctggaatgaatgcgacattgaatgggacgtccggacataagatgtaaattgagactgcagtcaccctaggtcagagacatccagcctttattatccatatcatggggaaaaaaaaatggaatgtgattttttttccccaaaacagcttaaaaaaaaatgctaagtaaaagaaaaaaataaaaagcaccttttaaaaaagcaggcctcacataaaatgccactaagacatcaaaagagaagtaaaaccctgctcaaaacgcccacgtggggcggccacagctcacccttgtgtgcctgtgtcccgtttctgctgtcccctttcccaaggacgtactctgccctaacctcaccctgatctggtgactcctccagtggcccatcctatgttcaccagctgggtcctcatctcctccgccacacaggctgctgctctgtcccccagcagacctctccctgtctctggggtgcccatgacccctgggaagtgctgtgcatagttctgtgagtgaggttgacttgttgttttatgcttagaattgtttctttctcctgaaattagatttttctcctctgatgactaggattctattttatttatttatttttattttccacgacctattatagcacatagcacctaacaggtcctcaggaagtatttaccaacagattgcatgaagtgagcccgttcttcctccctctctccttccctccctttcccaccccttcactggaaactcacagtcactaaatatgccatgaagttgctgccttttgcctttgcctgtgttttcccctctgcctggcatctgctcacatcctttctggcagctgccctctcatctgtcagggcccagtttgggtggcaacactcctgctgaggcccctgcccgcctcatcaccccagcccaagaggacagaacactgctgcccgcctcatcaccccagcccaagaggacagaacactgctgcccgcctcatcaccccagcccaagaggacagaacactgctgcccgcctcatcaccccagcccaagaggacagaacactgctgcccgcctcatcaccccagcccaagaggacagaacactgctgcccgcctcatcaccccagcccaagaggacagaacactgctgcccgcctcatcaccccagcccaagaggacagaacactgctgcccgcctcatcaccccagcccaagaggacagaacactgctgcccgcctcatcaccccagcccaagaggacagaacactgctgcccgcctcatcaccccagcccaagaggacagaacactgctgcccgcctcatcaccccagcccaagaggacagaacactgctgcccgcctcatcaccccagcccaagaggacagaacactgctgcccgcctcatcaccccagcccaagaggacagaacactgctgcccgcctcatcaccccagcccaagaggacagaacactgctgcccgcctcatcaccccagcccaaggggacagaacactgctgcccgcctcatcaccccagcccaagaggacagaacactgctgcccgcctcatcaccccagcccaaggggacaggacactgctgcccgcctcatcaccccagcccaaggggacaggacactgctgcccgcctcatcaccccagcccaagaggacaggacactgctgcccgcctcatcaccccagcccaagaggacagaacactgctgcccacctcatcaccccagcccaaggggacagaacactgctgctcctggggctgtagtgggtgtacaagttccctcctcctacggccccttgtcttagcggacttgggaggctcagaggctccagccctgtcttattggtgtttgcaggtccagaaatcttggcacatgacagttgcctggtaaactgccttgaattcattgagtggaacacaatatggtgtgctgtggcacctgatggccagcctggaggaaggggtacttttttctcattgtcatggaggtcccattggctcttcaagcatctctcccaagcatctaggagaggtgcttatttctcattctcacaaaggctctttgtggaccagcacaggaggcctgcctagggcttggatgaaaaatgagcatagagagaagaggttaagggaagcaagctcaagagtgggctcagagaaaagaatctgggggagtcaatgagatggcaggcaaggaacagtctccatttgatgctgatgtttgtgcagaatgactactttataccgtacagaaggagcacacgctcttcttgtggtaggtcccagaaacttctacttgggggtacatgaggcccagctgggattgggcacagaaggtcatggctctgcacctgaccctcaccttaggggtcaggagagagccaaggacacgagtgatgggttagggaggactcaggcaccatggaatactgtggccatccttccatagaggagaggtacaggtggcaaggcaggcaccaggcagccgccgacagggtcaggaaccaaggcaggtccaggaaacagaggccaaaacagcagcaggaacctcaggcttagcagaccactgactcttctggaagtcttttagacgctctgtggtggggcagggacaagtccttggtgtttggccatggtgaagtgtgcagttagggtaggtgagtcgtgctttcttaacacgggggtaaggaaggagggtagagtttcagcagctcctgtttcttgagcacttgctatgtgccagatgtggtttgaactgtttacatgggagctcgttgggtcctcccagcaaagtcctatgtagcaggcactgttgttctttttgcagataaagaaactgaggcaagaaaggtttagtaagttgtagagctaggtattgaaccagggcctaacctcttaacagaagttagttagaggctgttacttgagtgctcacaggttggctggcaatgtgtttggaacccaatgtaatgtcattagattctgcctaaatcttgtgaagaggggatttccatttgataggtaagaaaattgagaagttatcatcagcccgagatcaaacaagggtatagggagtggtgggacctattaagttcagatttatgtgacttctgatgctatgctcagtgatagatctcttcttgaggataaaagtttgagaattagggttcctcgaaaaccctgagatttctttttttgaggggtacctttttgtgttagcagatttaaagagctggccattgtatttgatggtagctgagtaagccttttgaattggagtatcatcaactattactagatttagaataggtatattttgctaagtaagatcttaaagtttttcctttaaacttaggatagctgttcaaatttcaaactcttcttttttcagtaagctggagacatttaaccttttgtcataggcttaaagcagtcattaaacagggtcatttcaatgcaactttttaaacctaactcccctccctttttctctttaattatgatcagtggcttcatttgagcttacctaggatgcatttgagactataaagctgctttcttaaaacttagcaatgttggctgagacaaaccaactgtagaatctcatgctttcataaagaaggttgcaagacattcattcacagttgctcctttattgtgtgtgatgagccattggcatcaaacctgcttgggttgctatcagtttttcttttgagagctggtgacttgcaatttaaaacacacatgggctcaagggtattggagggacatggcagaaagtccttctgctgcctagtgattgagagtgatggggtcctaactctgtgtgaggatagctctttgacacagctcacctcagtcccctttacctaggtttaagttgttagcattttgctgtatttgctccatctctttttttccctgaagtattcagaagtgaattacagacatcatgacgtttagttcctaaatacttcagcccaaacctctaaaaaacaagaacatatttctatataactgtagtactgttctcacaaaattaagactaattgcctaatggactctattacctgatccattatctgaacttccccagctgaccttaaaatgccttttacagctggactgtttaaaccaggattcaattgagaattctgtattgcatttaatcggtgggtctattaagactctcttaacctagaatagtgataaaagctttttactcttggtctctttgcaaactggggacccccagccagcaacaccccacctgggtctcactctaccatgctggggtgccctagctcacctgtgttatagcttgtacctgtgttcagtggttcccgagttcttgcatggcacccaagaagaatgaggatatgctggacattgagggtgaggagggcagagtagaattttactgagcaatggaatagctctcggtggagaggggctgcagtcaggtgcttctctccttcccgtgtggctgggcccagggctttttatgggctcagaataggggaggggcaggctgcaggtagtattggaaaaggcaacatttgattcattaaaaggcattgttcagaaagaatcaatcaggaaagggtgggcagacaggaacagaagttctcgctctggttcgtgggtttcatccgggaccagcagtccagtctttcagccttcaggctgtttttggctcgaaggtggggtttcaccggggacccgcccctatctgcccaggcgtttggctgcttcctatcactatcaatagtccctccccttcaatgacttgtaggaaggttgtttcgcttaccacattccatcgtgtcctggtggcatcatcaatgaatgaacatgttcttttccccatgtttcttgtacgtactgtgtattagaagttggactaaaggcttgatcaaatttgaggcaggaatgggtgaggctacgtgcgactggagggacacaatgactggttctgtcataatcagtgattgaaattgatccctgggtaaatgtgggggcagtctcatccctccactatcaaaaattaacattttttttccccaggtgaccagcaagtaacgaggggaggggctgttttggtactgtatacctgcaaattttaaatattgatttactttacttccaaaggattggaaattttgtttttttctttctttgcccttctttgaaaacattgtacaaagtaaatctccttattttactaatggagaagcttctgaaagaggctgaacatacattgaagtacctttgctcagctgtaagcccttctggatcagaggtcagaccaaagtttgcagacagttggtccctgtggaccagactgaatccacacatgagtttatttggcctgtggagcactgaaacaaaaaaatgcaaatcctgagccaacgtttgggagatcccatattataatacaaatcgagatttccaggtttctggaaggtcttggcaatctagccacactgggcctgcatctgtgcaaggctgcatggctagaggtgtgtgctgggcacacccattaggtgggactgcgcctttctggccactagggaccgtacacctcctgttgttttcatgggggctggtttcccttgctgacacgtggccatgaggtccctcgaggtacaggccggcatttggacttgtcctctgcactgtttctttgttagcatttagaactgacttctcctcttcctcccccattgaggagcagcaccttactctgtgcagagtctgtctgtgatctgcaggctctttgcagagctacatttctctttggaggccttgctgagcagcctccgctgtctagggcattgctgagaatcacaacatcaacactaatggcccttgggccaaaaagtgtttgtcttaaaatccctgcaccaaatagcttgtgcaattactcctgtgagagccccagaggatctaactcttaggctgtttgttctagctgtattccttcccaccccccaaaccgaaatgacattaaaggatagtaactccctcccgcaaatatagataaaaacctctttactccctaacaaccacacaactatttacatttttgtgtttacctcctagtctttaagtatatgaatgcatgcaacgtcctttaaaaatatgtcaatcctagcctccacaccacccagccgaccaggtttcccagagggaagcattggaaatggcagatgggtaaatgcacagagctggcaaatctccatcctgcgggaggcttgctgtgcaatatagccatcgccacaataatggatcttcctaatgatccggaatcactgagcaaagactgtgccatgttcagtatacactaagtgagcatgcagggaatatatgatcagtttacaaacatttccacataagcttttttctctctcccactccagttttggtaaataaaagagcaaactagactgctttctttctctctctcactctccccctgtctccctccctcttcctctctgtccctgtccctctctcctgcctccctcattcactctgtcgtcctgtctctctcctcctcctccttccttccttgcttcatttcccccctcatctctttcttcctcaccctttttaaaaagagacaggagtcttgctctgttgcacaggttagagtgcaggggtgcaatcatagctcactgtaacctcaaactcctgagctcaagcagtcctcctgcctcagcctccccagtagctgggagtacaggcacactaccatgcccagctaatttttaaaaatctttatagaggtgttgtcttgctgtgttgcccaggtgggtctcaaactcctgacctcaagtgaccctcccgccttggcctctcaaagtgctggaattacaggtgcaaaccactgtgtccagccagacaggtcacttttctgtaccattccctgatgttgtgagattagtgagagtccctactgtggaaccttgttcacgttgccctgactcctgatgcatggatatttgctgttaccaaagacacctctgctttaccaaatgttttgacagagtggaaggaaaactacaagacttcttgccctcgttttcttcagtctagaatgatgctggggtcactgagtctgtagggcagagaatctgatgtgttttttaggaagcggaaggtgtctgacacatagatgtttgacaaattttgttaatctggtcagagtgcagcctagaaaattaaattaaaaagctgctgaggagtgctggggtcgcattttgacatagatacaaaggcaccaatagggccaaaagtatgaggccagtcctagggctggtgaagtttggatcccctgcctgacattgtgtcctgagcccctggccccttcctgcacctctccctgagccgccggcccctcctcattccttcctctcctttatcttccgctgtctttgcctgtgcccccacgcccgtgccctgaatctggagtctttgtcttagtgcattctgtttgtctcactgtcttcctctgttttccttttcttgcggggaggaagggtagaaagagtgtaagaagctcaagtatgaggaagggaaggttgccaacttgagatgagtcagaaatgaaagcagttctgaatgtgtaagacaatgaggaaaatatttatttaacaaaaattgaactaccaaccaagccttcaggaacacagccagaaggtgctgtgtagggagaggtgtgcattaggatgctggagcgtggctgccggcatccccaccccaggaggaagggactcgtttctctgaaccttgttaatggttctccccattgtagacaggactggctctccaccccatcctcagtgggtgcagctttggggaggccgtgaggctggtgatcttggggcctcctatgcatctgtgttattgaaggtaacaatgtcccttctacccaaaagtcatgcttttaaaaacgcacaatcttgaatccatttgggaaacatctttggaactccagaatgttgtctttctcagatatgtattgccaatgttgtattacttcatttgctaagaaacattgtcatcgactttataaaattattgaataattctatttgggggagaagcctggaagctaagattttaaaggttatttataagttaagtgaactggcaaattcttaaatggtaaataaaacctttcctacatgctataggtagttatctaaatcagggcctaacaagcttttttatttattttcctgtaaaaagccagatattaagtagttgaggctttgcaggactgatggtctctgacatagcactaaagcagccttgggcaatacataaacaaaggggcatgtgtgtgagctgatggtccacgggctgcagtctgccaacctctgatgttataagccattgattttctacaacatatatatttagaactgggagtgtcagtgttattttgtcatggtttccagattaaactctttcatattgctgctggtcggtcaatgacagactaattctgctagcattgactttctgggccagggaatggggttcctagatagtgcagtagctttttatttattttcttttccattcaagggtaacatgcttaaaatacagcgtatgaagcttttggatatccactgtaaattttaaggtctaaaaatgaatgcaattgtgaaatgtttttgccttagagaaaacgctctcactgctttgtgttataaatgcatgaaaaataatgatgaattaaatgcatacaaacagatgcagacataatttagatgagtgtattgcaattaaaatattgcccactttcgctacggaatattcgttggacttatgaccttagtgtaagtaatgtttaataaggaatctgcaatgtgtaactcctccgtaaattattaaaaggattggcattcctactgtataatatcaacacaagggatagaaaatatgcctggattcttaatgaatgtgtgctaacgttccttctggcataggaatgtgtagtaaatacacttcaagggttgttcgcatttttatccgtcattgttataggcatgttattgtgtgtctcctattgaagaactgattgatcattgttttaagcttctgtgacttttagatgcttaaaactaggcgttcatggtaggaaagtagagaaacatgtggaagaaatactgcgtttcaagtttgggagtggctggtagaaaaatcaaactaggctagtcttatagctttatcgcagttttgttttttttcctagtaggaaaatgatagtattggttgtatattaaaacactctctctgacactgacttgaatcacgtgcgagttcattgagaacagggattttaacttggttaggtgattttaaacattatttagcaaatctggaaaacaaaagagaaattttcaaatatctttcttccacggtggtgtactggctctctggagtgtgatttcatcttctcttattattgcatatgtagtcaagccatcatgttcttgaagtgagacttcaaccactagtggggccgtataattcaggatcttttgtttgtccttacgtagtttcttggcctggaatgtcaaaatatcagaaactgttctttctctggaatcatctgtctccgtgatggcctcgccatctgtacagtcatccaagctagggaccaaagagtcgtcctttactctctcatccttccggctgctgtgtctggctttcagtgtttgtgtagagcaggggtctccaactcctgtggcgtgttaggaagtgggccgcacagcaggaggtgagccatgggtaggcgggcaaaacttcctctatttacagctgctccccatcattcgcattgctgcctgagctccgctgcctctcggatcagccaccagcattagattctcataggaccatgaaccctattgtggaactttgcatgtgagggatctaggttgcacactccttatgagaatctaacgcctgatgatccgtcactgtcccccatcacccctagatgggaccatctagttgcaggaaaacaagctcggggctcctactgattctatattatgaagagttgtataattatttcatcatctattacaatgtaataataatagaaataaagtgcaccataaatgtaatgcccttgaatcatctccaaaccatccaccccactcctccaacccccaaaccagcctggagaaaaattgtcttccacaaaaccagtccctggtgccaaaaaagttggggaccgttggtgtagaggactcctcaagcagcgtccatatctgccctattctctctattcctccacctaggtatagaattctatctctaagacacagacagaccatgttcctgcctgggcaaacacttcggtgactgtgcattgccctgggtgaacgggggtacagaggtctttgtgacgccctgcaacgcatccctctccgagccgcggtgcgctcttcctcctctgtgccttgccggtgcccagaaccacccccttctccctctttgcacaagtgccttgctctctcctttctcaggccagtgctgctgatctgtctgtgtgacccgggtgcacagtccttggctctgtgcctggccctgtgcaggtctctgtggtggcacttagcacatggcgctaagattctccctgataggccttcagcgccgcaagggccagcaccgagtcctgcacatcctgctctagtcccacatcggcccaggggcgttgagctgaggacggctccctaccccgtttctgtgcttggccgactccagcgcccgttcttctgcccctccttggctctgcctccccaccccttggctgaatctctcctcctttcgtgcttgttctccaggtgacttattcaggtccatattttcattacccttgcatttcattaattttctcatttattttattctgtaggtttaggacattctttaaaacatgcaggttctgaattttaataatataaaagtcctctgtgagtgcccatcacattgcttttctgtcctccctacattaaagttagcactgatgcctttatgtttaaggaaagcctcctgcagaggggctctgcccatgtaagttcattggaaggcaggtgtacagcctctgtcacctgaagacctcttaactgtctattccttctctggtctatcgaggtgtattgggggggttacagcaccctctggtggccatattgtcaggtgcatttttgttctagccaaataaaatgataacacaaatcgaatagtcgattggagttctttttcagaggacatcgttaattcacattttgtgtgtttcagcaggtatttaagccattctcgaatagtgacacttatgcagaggagagaatgattttatttaagtaatttctactttttacatagctagttttaaagtagataatacatagtcttaaactttatttcccctttatttctttcttttctgttagagaatttcttaaacttgtagaattatccaaataaaatgccagtcactaaaaaggaataattaaccaatagtgggaaaaaattaaattcttcaaatgaagagtactgtattcatttcatatggtcccagagataaaatgtttaggattcatttttagttttaaatgtttatgaatcagagcttcaacactcttccaggtttctttaagaaaggaatttgtctatctacggattaattaattagcagagcctctctgtgtcaccaagactggagtgcagtggtgcggctgtagctcactacagccttgaactcttgggctcaggcaaccttcccacgttagactcccaaatagctagaccatggtgcatgcaaccatgcccagctaattttttttttcaatttttctgtagatacagggatctcgctatattgcccaggctggtcttgaactcctgaaggcctcaagcgatcctcctgtcgtggcctaagaaaggaattcctcatatagaaaaatattgttatataaatagttgcctatatccatgctgtttatggtaacagctaaggttcatctcaaaagtatttgtatttggctttggaataaaaagaaatttcccctttcatagggttctgagattgtaggagtttttagtatttcaaaaagttaatggaacaatctgtgatgtgaaagagactcagaagaggctagagaggtctttaacacattttttttttgtattgttatcccttccctatagctaactttgtagatgacattgtttttcagactgatgattgtgaccctcaaccatggcagcaacaatttttaatttaaattttttaaaatgcaaggttgggtgattttctctctggatgcttgagttttgtttttgataaaaattctaccaggggcaggggaaagagtccattaagtcttggtgcaagaaacctgggcagattgcctaagtggatatgcatagcaaagaactgaaaacagagtagggggtgctgaaaacacccacagaggaaaatgcggggcggggggtgaatgcatctgctcattttgtaataaagtccttcctttcctttaacatctcttaatgttacaaataccaacaaaaaccatgcatgtcttcagtgggacagaaaatgagggaggcatttagggagaaaaaagtgtcagttgagatgatgttaaaataaagtttattttctttgcagttgcagacattaagatttattctctgggctgttaggacagttcctgcagctctctgtggtgacctgagcattgatacctttttttttttttttttttttttgagatggaatcttcctctgtctcccaggctggagtgcagaggcgcaacctcagttcactgcaacctcagcctcccaggtagctgggactacaggcacctgccaccacacccagctaatttttgtatttttagtagagatggagtttcaccatgttgcccagagtggtctcaaactcctgtcctcaagtgatctacccaccttggcctcccaaagtgctgggattacaggcgtgagccactgcgcctggcctgtgccttggtttctcagatatttctgcccctgtagtgttctatgcactatgcagggaggtcctgactgctcagagcttaaattctgcattcctttattttaagtgtttggccaactgcagaggaaggtaccttgaaagatactccctcttctccctcactgctgggtcccctgtcataggagacctggcctgaggaggcttcttcctggtaacctgggttgtcactgggaccacatcttcccataagaataatgcttcaggttgtatgggagaagcgtctgacagcagtaacttcagcacaccctgagaatggcccttatggcagacacaccggacagcagtcactgaagaaatgagggttgccacatggaggttgctgggaggagggtgctaagtgaaggtgctgtataagctgcatgctttttacaagcagttgaagttctgctgtccagcccagagccactgggccaccctataaataagttcctccaaataaaccctgtgccttgtttgttagctctgggtctcttctttggcttcttcaacttggtgctgtccctgttgaagttaatacgggtttggcacaacacaggagtagacggttacctgtaccctgccagctgtccttgctacaaacatttgcccagagagtggcatttgtgccggttcttaaagtgtttcttgagctgcacattaataggccatgtcctctttcaacctgccctctggctaggtagaacaaacactcttcacctgggctctgagccagctgctcacctgcagcacccccctccttggagatagcttttcatgttgcatcttaccgagttgattgagtattcacttcgaagctccatgctgcacgcatgggcctgtaaatagctttttcgtgcacttgtgggtgtcatttcagatcgcttcatcggatttcagttacccaagtttttacttggttcaccgtaagtttgcaaaaaagactttttgttatcctgaacattgcaggtggaaacatgattaattttgaattatttttgtttaacttctaccctctttcctatttacagcctattttgtttattttaacttccgctgttaagacttctaaggccaggcatggtggctcatgcctgtaatcccagcactttgggaggccaaggcgggcggatcatgaggtcaggagatcaaggccatcctggctaacatggtgaaaccccgtctctactaaaaatagagaaaattagccaggcgtggtggcgggtgcctgtagtcccagctactcaggaggctgaggcaggagaatggcgagaacctgggaggtggaggttgcagtgacccgagatcgcgccccattacttaaaggaagtgggcttgtgttttgtggccttaaggatgtaatctgttggtaggagggaatgagggtgtcctggtaggggtgtctggctttagtgtcaccattcttttaggaattgccatgttgtggggtcacgtcttgtaggagaaacgttctgaagtcatgggattctctaccctcctctcctgctcttggtttccaccagcagcctgcttggtgtggttttgaaatggagcagagatggttttgatgagcctcactggaggtgctgctgagattaccgagaggccttgctgggcacctggagtcaatcatgccgggcactagcatccgtcatcttaggaggtagggattattatcctacctcctaagccatccctggagtggtggcttggagaagttttccagagaaaccgatcagttcataaagtttctgtaaaggattaacacagtgtagtccagaaatgtttgttcatgaagtcttggtttttgggtttaagaaagtgttctcctgtctgggcgtggtggctcacgcttgtaatcccagcactttgggaggctgaggtaggcggatcacgtggtcaggagatcgagaccatcctggctaacacggtgaaaccccgtctctactaaaaatacaaaaaattagctgggcatggcggcgggcgcctgtagtcccagctacttgggaggctgaagcaggagaatggcgtgaacgcaggaggtggagcttgcagggagccgagatggcaccactgcactccagcctgggcgacagagcgagactccatctcaaaaaaaaaaaagaaaagaaaagaaagtgttctcctaagtgctgctcaccctttttcccaaacaggacctaaccctgcgagggagggtgaattaggccatttgtttacagtttcatcagcaccaggcgtgcacggcgttagtcatggtccttgctctcaaggcactgtacttgtagcagcagtatggtgcaaatgtgcagctgaacagtggacacaggttcctggttagcatttagtgccacaggaatgacagggaggtcttaattgtgatcggaccgtgggagctggattaccccagactgtagctcacttccctgtaagcttttggtagggagcttggaattagcaccattagtagaaacagatttcaaagggaatggtacctgttccgtatgaaacactttaaaactcccggtgtccacacgtctttaaaaaagaggcttaaagcagtttcatttcatcaaccccaaactggagaagctatgaatgaccacactgatgaatatgtcctaaaatatatgtatattatataaagtgtaaaaacagacaagcaggaacatactaccagtttctatcacagctacccttaaactatcattggagggcaattaagtgggtacaacctctagctatttggaaatatgtataaaaatgacaaatgcctggttgggtgctgtggctcacgcctgtaatcccaacactttgggaggcctaggcgggtggatcacctgaggtcaggagttcgagaccagcctggccaacatagtgaaaccccatctctactaaaaatacaaaattagccgggtgtggtggtgcatgcctgtaatcccagctactcgggaggctgaggcaggagaaccgcttgaacccaggaggcagaggttgcagtgagccaagatcgcgccattgcactccaggctgggcaaaaagagcaaaactctgtctcaaaaaaaaaaaattaaaattaaaattaaaaagtaaaataaaatgatgaatgcctgtactcttagacccagcactcccagttctgccagttcatgcagcagatacatatgcacacgtacagagaaggatgcaacagatacatatgcacacgcatacagagaaggatacgtatgcacacgcgcacagagaaggatacatatgcacacgcacacagagaaggatacgtatgcacacgggaacagagaaggatgcacaagaacatacattccctagttgacggagtcgcagattagaaacaacagaaaagcgtccattaaacaacagtttgaacctgtgttgagatatcagcatcccttctccttctctcccccactccctctgccctctgcaggttttattctcagcctgattttctccattggatgtcagccctaggctggcatttgcagagagagatggtggctcctgcagagcttacggcctgtattttattgggctgtgttgagttacccctgatgtgagcaggagaatgggatgttctgtaaattggcctctagcccatcgtgaattcatattttttttataatgtgtgagtcacactcccttctgtcttcatttccttttcacactcccagcagatcattctctctattctgattggcattttatacatgaggcagcagaggctgagacctactgtattttgagacactgtagctttatatggcataattaaatcatagtcatcaatcactcttaggaggtaaggattattattggcattttccagatgagaaaaatggaggatgagaaaggttaggcatcttgctgaagtcacagcagacttaagtgccggagttggagctgcattccggtatgcttgcatagactctcttctcatgctcactgcacgccagtcacctggtatgctgaggccctgcctccaggccttctgattcagctggtctgcagccctggcatttccagctcctcaggtgattggaatgaaagccagagctgggagccactggtctacaccaccagtaaatgatcgggttctcacttgatcatttaattaagaatcttggttttctgctttcagtctgagaactcttgttcatgctctcaggcatgtcttcacgcaggaaagtgatctttgaaattaataggtgcttggaaagcctttaagcagcaggcagtggagaaggccactcagtaggaagggccgagcatgaagcctagtgcacaggcttttcaagaccccacggagggtcttcagaaaaatgggtttcctttgtctccgtggcttccagtctttgttggccagcagttgtctgcttcaaatgagctggctctagaggggcctggagaacccagaaaaactttgtgacaacctgacaagtttgtgttaatcttctgggcattggctttctgcacttattgctcactgaatcactgaaccaggcaggtggggtactggagggcaggggatgggtaagaagggcagcctttggaaggaaaatcagcagagggcagggaccggggaagaaggagtaagaagggaaacccttttcttaggttcttataaatcagaagagcaataaagaaaaaatttaaatctaaaaaatacatgattaggatttaaatccagtatgcttcactacatataaacctttgacttaatattttctgtagtagatgaaaataggactttttttgtttcccttctcttcacatggtattgagtttttttgtgttctgaatacgtgttaagattaattatgaaaatcaaattaccagatacttgaaatataaaattagtaatattcaaagacgattaaatgcacgatttccttttctcataaaaaaagaagcagacggaacttgtattctgaaagcaaatatggaaatcacattaaaaatcagaaaatcctcaccaccgccccccacccccatgtgcatttcatttctctttggtctgagttcaagggagagagaatatgaatgtgctgctagctcaggaagcttcagttctaactttctaaagagctgggaatgtgcttgagtctctgttatctcttgtttgcatttttcgctactttgcctccatttgatccagggaaaacttcatggtagggatgtgagatgtattttgagggctaaaagaaaggagtttgaacaaaagcaggacagtgttccgaatgtggaagcaaagagtccttccaaggggatgtgcggccaacgcctctgttcagcgatagtccagctgagaccaggacctgtgcctgatgcccaggccaccccacaggacggtcctccagcacctcatttctcctttcatcagacacctcttcactggcctactgggagaaaacggagatgagtgaaaatgtgcatacagaacatagggctcaaagggaccctagcaccagtggtgctcaagcctgtcccagcattagcgtcacctgggagctccaaaaacatattgttgccaagactcagtccaaagcaagtgacttccttggcctggagtgagatgtgggtggccagggtcaggaaccaccgagtgggtccacctctgcagactgggaaacagagtctgggaggctgcttgttccctcaaggacctgaagtgacatggggaggcaggactagccttggggctcctaattctgtcctggcctgtattccagtgtgccgtggggcacgtccaatttgaatctggccccagtacactctcaagccctgtgttgctctggtcccacagcttctgcccttgactttccatataacagcacattggtggccagggctttgcactaacctacctgcctccaacattgtttttgaataatggaagctaagcagatgcatattaatgcctgcattatggagaagactgtctcttcacaagtaatctgtagttgttagtcttgaaagtgggttaattcattgtctttctagagaaaatgattgcatggcctaatagtcttccagttagtctgtgtggcaaggtagaagccaggagtggattcttagctcctgttgagtgctgctgtcctgaatcagagatcttctctcccgggccactttgtcatgagcaggattttgaaccaagaccttttcttcacctgtctcgggggccctcaccgtgggctttgtgatcccctgacagctccaaaagcctttatcctcatccaatatctggtgaacagctgacacctcctgggaatctttaaaattgttctctaaagaaaccattctgctgcaagtacctatttttagactttataaagcccacgtcaggttgtcgctgcctttctctctgtctgctaagcctgctgtttgaaaggcagcaacaggatcttttgtctttaaaagttcagccccagctggtgcattccccacttgaactccatagccctggtgtgctctggggtacgtctcttccaaaacccaaaccacaggcagtgacctttacaccccaggagttgaaataatacacctggaggaagaaaataacttacaaacaatgagcctagagtataaatggctatgttttaaaaccctcgattttccttgggcgtatttaacctgtacagctagactgttgtgagttttgggctctctagggggctgtccaagttcagaacaagtgcatctgctggcagccagcttaaggagttagcagccctcaattccaataacgaacgtgtaaatcagaattcaggtgtgttgaagtggggccttgcacacatcctggtcagcccagggtgatttcctctctggccagtggttttgggttttttcttcacatgaactcgtctgttgtaactaatggtcactgagtgacttcagaggtagtgatagctcatagtgaagcccgtgacccacagcggtgggcacacctcgatcccttctccttttcctccatccccacctttctctccttacttcatcccttcctctttccacattgggtcatccagcagaagtcaagtatcttctatttcatatctttattgaataagagttttacgatccatgttattgaagtaggtaaatggaatctcttatgtggaattctctaaaaaagaatcaaaactccagtcaaaccaaaccaagtattccaaatcgtttttagggaaaaaagatataattagaaaagactggagagggtatgcaaactattaacattatgttagggtggtaggagtataagttatatttgctttttctgaatttctaaattttcttcaattaacatattgttcaaagtatcaaatacatagaaggaagagtgtgcatgcctgttatctagcaaacacacttcatgcaaagaaactctcctaaggaagtatgaagttatattttatccttatctatccaaagagagtgtgtgtgtgtcatatacctaaagaattagttattaagatgaagcattgcttataatgaaaaagttgaagcaccctaaattagcttaataatggtatatctttataatggaatagtataaagccattagaaatgatgttacagataagtatttaatgttatggaaacattttataacatagaatgaaaagtaaattgtagattggtttgtataatttgatctcatcttaggaaacacataatacagaaatatagatgaaggtctgaagggtattaatgccctaatgtattagtagcattacctcagagaagcaggctcatgagtgtttattttcttttcttctaactaagtatgtatatgtgtaagtgtgtctgtatacaggagatgtacatacacttttcttgtgaagaatctgtattgcatttactactggaagggtttattttagatttagatattaaagttacctctttgagtgagaacctatgatttatacttcttagcttaccttttacctccattatttaaatctgtctttttctgccatcaaatagaagatgtaacagtgataaaaaggctgggtatggtggcttacacctaaaatcccagcactttaggaggccaggggttcgagaccatcctgaacatagcgagtgacgtagtgagaccccatacctacagatttttaaaaggttagccagacgtggtggtgtgtgcctgtagccccagctactcaggaagctgaggtgggaggattgcttgagcccaggaggtcaaggctgcagtgagtcatgaatacaccactgcccttcattcagcctgggtggcagagtgagactctgtctctaaaagtataatattttaagaaagaaaaaacaaaaactagtgataaaaagaacttacaacaaactgatttttaagtggactgttgataattataagggctgagatttttaattgccatttgtatcaatgaataacccccctgtcaccacattttctggtgtgtttggtgtgtctggttcctataggagagacagtaatgctatttgacatgctttattgctgattagaagcctaatctctgtaatgggaagctcagtaatgaagcttgttcagaattgtgttacagtcggttaatgaagctctgagatcaagggcctggcttttgatggcccctatttcagaatccagaggtttgtttctatttatttgggttttgcaggtaagttccctggactgaggtgatctgaaggttagctctgctataataggtaaattgctaagaaaaacattggccttggtatgtacaacttaaaattttattggtgagatagtcttcttacaaaacaatcacgttaagctagaacttggtgtataaccagcatatatactcctgccaccctcagtgtgtagccaaagttctaaattgcatgcacagataacaggcatataattggtgatttcagaaaagttatacctggtgggcagtgagaggcgagccctgatctgggaaaccccagtgcttcaaggggaagcaatctgggaaactccaatgctgggattgggattcaatctgggaaaccccattgctgacaaggtacatggtacaagcttgataaaaacttgcttaatgtcacacttgtaatcccaacactttgggaggctgaggcagctggattacttgagttcaggagtttgagaccagtctgggtaacacggtgaaactccatctctacaaaaaatacaaaaattagcctggtgtggtggcatgcacctgtagtcccagctgctcgggaggctgaggtgggagaatagcttgaatacaagagttggaggttgcagtgagctgagattgcaccattgcactccagcctgagctacagaaaataataataatttaaaaaaacttaatgatgatagcatttgagttggcttttcaatcctggtttcctaaatatgtgagcctggaccattaaactgtgtgacaaggagctgtcatcttaacatacagacattaaatgcattgttcaagatcagaaatgatttcttggttctgaggcactattgactgtgtgtaaggtgccatcgttaatttggtaacaaggggagacagtggcagggaagttccttttgcctgtcttgtgataggcttcctattttctcaaaggttaagatattaaattgtcttaagcaaagaaggtatttaagggcatcatcagggttagttctcaggtctcctgactcctagcttctctagtttagtgattcacgttagcctttcaacagtttaccactcactttaatggtttttcctagctgtcttgacatgcttttcactgcttacatggttagtttcctacctagctgaatgcaggcatctgtgctgtctgctgggttcgctggtggtgatgcagcccacaggtacctgtctctttgaggggagttcagcaaccatctatttatgtcgaaaggcactgtactgggagatgaagaacacggagttctaggcctccaggaatttatcatcacttgctaatttgagctgagcctggcacttgaacataggccatagatttccagatgtgaaaaaaagaaagaaagaaagaaaaggatcctttaatgtatagacttgtctttctgcctgctttcttcacttctgatcattttaaacaattgatatcctagtttgatgtgatcatgttccaacacagcacaacagcatgtatggtttggggcatgcacctgtggcagttgcaaaggtttttacagtgaagtggctaagaggagagtaagaccagtgtatagggtgtggatgaggtcagatgcgagactatttcttgatttgagtcattttatttaggagctatttctttggaatactttatatatgagaatgtacatctgattggaagacagaaggtactgaaatttacctcttgatcaaattattctggtataaaattaaactaaataccaatcatatacttaatttcacagacttgcaaataatatactggggtaatggaagtaagagacaggaccttttatgtggtatgaagttctgtgataattcctatcttcctttgtacctaaaagaggcaccctctcctgtcatactgcaaacagatgccactactacgtgtagacacatttgccagctgtggcacagctggtcacccagccctcatcacagctgcctgtaaaacccagatttattctcttccccctgatcttttttagaaattactggtatcgttttagagagtatccaacttacacacaccacttaaataatgaattttccaatttcttctttttccacggccttcacgtcatctggtaaatattcccctcaggttggcatctgcttctgagaccctgctggacctagatatattcaccagagatgggtgaaggctttggaagagtgaagtggttaggaacatttcttccgatatctcctgctcattgtttttgacctctctgatttccagtatattctctgctccagccacacagctttcctgaacagctaagtcttgctcaccggtcagggaccagctcaaaggctgtccctttttaaatttatttcctgggtcttctcctggcctcttccctgcactcggtggagatgcctgccccatggttttcagtagcgttggctcttagctgttccgttctggggaaggattggttgttttccttttctccatgtgtgttgtgaatttcattctgtgtcaccgcatcacgcgaggtgggtagggaagagaacttttacgctccccgctgtcgttagtggcctgattacgagtctgtgggaaagaatgaaggttggaaagaagatctggtgggaaagaacaagggttgtccttgagcagccaaactaagctgtgagaatgttaatgtaataaagcaggaattctaatgggctgcctgctacagaggagatgggagatggtgtagggctcatgactgtaaaagcaggagccaccagcagatggtgatgcggcctcttggcccaggtgggactctgcatctccccctcccatggacattcacttgataagtgttgggccggtcacccatgccctggtcgttcttatcttatcgaagagtgctaatataagtaagctgtaaattcccattgtaagaaataattgccttttaaaagggagcattcaagaaaaagaccttttggctcaataaagcctttattttcctcaacactcttggctcttaaaaggggcctgttcttggccttgaagtgggaatttacacagaactttaaacagaagaaaccccctctgccttgggctgcaacttgttgtccctggcagggtttgggctgtggggtcatgggatctgtttgtttgaccgttgtatgcaaaaatgattttaaaattggcctccctaatctgttggagacattagttaaaaaaaaaatgagagtaaagaggaaaatattttgctattgggtatgcactggatccatttttaaactgagagaaggtgaaaggggtgactggttgatttcggataatacttttagagccacggggaactgtgaaagacaagaaaatgtaaaaaaagcacattgattgcaggaccggtggtccaaaagcagcacgtgaaagaggtttcaaggctgtttctacaaacaagaatgccaaaggtggcataggacaagaagcttgctggatgtcacgaagctagtggagatgggatccaaagctagttttggctgatgaaaatacaggctcatgccctgtatgtgaggacagtgggacagtaatttaaacagaagtatctagaggagtttccttattgccttgaatgtatttctttttaacattgctatggacatttaggaaaagatgccactgatattccaaaaggggcattccatacacctgagagggatccctgaggctccagggtcacctgggccaagccaggtatacacacgtctcatggcaagttggctgttatcataacttccctggtgttgttttgttgcaagggcagcattgtggggctgtggtttgaattgcttttttgtgtctcttgaatacacgaagttcctcctatagtcattggctctgctgcctctgatgaggcacttccgtgttccccacatttgaatttgctcccgattcgagagaggcaggcatccgcggcagcagcttccaacccagacaggcttaagccgcgcgagggtgcccgggtgggtggctgcgcagggccctacctgggcgggagcggctgcagagccctgtccacgcggtgcctccccagcacggcacctcccactccaggctgttggttacctggccgggagctggcggagaccaggatttctcctcgccgccgttgctgttgttaggggaaacagaccatctgcatctagacctgcctctctctccgctccccacttcagacgagctcttcctgcctggaatctggtaagtgccaccgaaggttccgttccctttattactcgattagtgcccacagcatcaggagaaggttctcttaccgtgaatccattagctttaacccaaatgtgcaggattagggggattatttgaacttgcttgctttctttttaaaatgtccattagacattttttgcatgcttcaaaatcaaaaggcggcacagtgaaaacattttaattatttatgtatttaacctgtatcatcttgtttctaacctcttttcttcagggtggtgcagtcaaaaattacacagatattgctctggtgcctctccccccttttatgaataaattactgcatttgtcatcactgtgttcctgaaatgtcaaaaatagacactgtaaaggaatctgtcatgcagagttcagaaattttcaaatttctgagttcaaaacctcaggtgaagcgaggacagatcttttatttaaaatttgattctttgtaggcttcactgtgaaataagttcaatttagagcatagctaatgcaatcagccagctcgtgatgggacaacatacttctctattgttttacattcacctcctgggatacacacactttctcatttgttttataacctttacaggaaatacctggggatgagtcacatgacccctaacttgagtttttacatgtattcacccagattaaatgattttgctcttatatggataaacgtgcagttaggaactttaaaaaattgtaaatgaggtgcataatcattactcattgtcttttactgcattcttcagccctcaaacatacaaactgttattccctttaagagaaaataaaactggcacttatgttttcctttactctaagttaaagactacccatgttatgtgccattaaaaaagatgtagaaattaatctgtctttttctttgacctaatcttactagcagggatattggggctctacttttctgttctctctctctctttttttttttttttttttttttttttaacatcagccacaggtaatactctccggtaaacatataacttgaggaaaattgaattaggttaatgctggaatagaaaaccagggcagtgcctgctctttttggataattctgtataaacaatgagaaagtctcaggctgccttagacaaaggctgagacgggagctcctgatgatttttatgagggggaagaggagatggtgaggaggagggcaccgagcatgtgcagcaacttgaagcatgtcagaaagaacatttgccagaaatcttcaaaaccgtggcggtcggtaatgtgtgaaattgaacttctgaccctgtttgcttgatggcgacttctcgttgtgcttgagaattgtgtggcattgggtccctggatgtgggaggaacagcaaagtggtttagtgaatagagagggaagtgccttcctttttgggtgggacttgccatgatagagcctgggccgtcaccttaaaaggagatgtttctgttgagagatggaaaattggcaagacaaacgccataaaccttaacctgtttataattccttacctgtaagctgctttgcacgcaaggtgatggttctacctcataagggacaaggaagaacagcacataaacctgactgaatggagtgtggctgtgggtgggagcagctttacaagaaggaaacggggccccctcctgagacacccccgtttgcttctgctccttccttgccattgacgtgcccttctcctgaaactacccacacctgtgtttggcaacaagcggctgccccttgatccagatgcatttttcaacttgcgaactctcacctcttgccaagggacccaagtacctggttaatgatctttaatgtaaatgatcctttgccttgattaacattgagctgggttagtatgcacaggccgagctccgtggtcctcccatgtgatcccttccctgccagccacctgcccacctgtaggaactgggcatggccagttttctctttatgtgctctctttgccttggatggaatttgggctgagaccgatgaggtggaaccaaagctgttcagcagaagagagcaaccacagagcagcctgttgggtggagggcttgagggttcctaaaatccgaggactttctggtgagcctctcccctgagcctgcttgagggaaggcgctgccccacacactctccagtgggtgggggtgggggtggcagcggctgatcaaaggttctcacctgcaagtgataatagcctgggtctctttggcaccaacctgccttcttcacctttctgctcagacaccccttggcacccctacataaaggaaagagctgtctggatggcctagtaactgtaggataggtaaagttagccctttcttctgacctagatatgtgatggtggtatttctacatgtttatgtcgagaactttacaaagatgaaagaaaagctttcagagctgcagaaatgagaggtggcccttttttaaaatttattttaagaaacaacttttaaaaccactttttgaaaaattggatggcaccgtcctgcagcctatcagatttcccttgagaactggggattattggcttattccttgctacctccaatcccaaattaagcagagtgacatgtaagaagctgggtacatcagcctaaagcgtttatcaggtatgtccttcccaactggatcttttctactccctggcccgaattttgttttagggaatggggcctattttaattgctggtggcaaaaggatccctgggcagtgtttccatggtcctctaaggtggagtgtcggggagctgggggacacacagtggtcatgggttatctgtcttggcctctttcccagaccaagttctgtctcatgcttattggtttggctgctagttatagaatctgatgtttaccttagaatcctaggatggaaagggttaagaatgatttctaatttgaattccttgtttctagggagttattaaacctatacattacatttattattttacaaagcactaattcataatagttgacaggaacaactattttttggcttctttgtttttttgtttgtttgtttgagatggagtttcactctgtcacccaggtctggagtgcagtggcgcaatctccgctcacagcaacctctacctcccaggttcaagcaattctcctgcctcagcctcccaagtagctgggattacaggtgctagctaatgtttgtatttttagtagagacggggttttgccatgttggccaggctggtctcgaactcctgacctcaggtgatccgcctgcctcggtctcccaaagtgctgggattacaggcatgagccaccacgtccggccttctttggttttcatattgattatattttctaagacaaatactcatttatatagtctaataaaaattgttaaatctaattaaacaactaataaaaatagttgtttaatccacgttgacatcttcttacattgcgatagaaattttgatatatttatccatatgatgaattgcttaaagccggtggttctcaaccagtggcagttttgccttctctcccacaagggacatttgacactatctggggacatttttcattgtcatattcaagggagtggggtgtgaagctggcaagcatctagtgtgtagaggcctgggtgctgctccactttctacattgcacaggatggcacctgacacacagcctaaagcgtcggtactggttgaccgtatacgaaatgctgtggaagaccaggcacggtggctcacgcttgtaatcccggcactttaggaggctggggcatgaggattgcttgagcccagcagtttgagaccatgtttaagtttaagttcatttaagttctctgaagtggtgattctgatgctatatagatgaaggttggtttgttgaagagctgactctggtatttcatccaacatctgcatttttctttagctaaggatgccttgagaaacattctagtctcttaggcctgaatttgttattagcttaatagctttcctctggttgaatttaaatggaaagaaaattgcatcttgcaacaggaaaaagaacattagggaaaaactgaggaaatggaaataaagtgtggaattttgttaataataaatcaaccttgatgcattaattgtgagacatgtcctgaaccaatgtagatcttaataataggggaaactggcttcagggtacgtggggactctatcttatctttataataattctctaagtctgaaacaaaaaagtttattaaaaaagcacaaacaaaattgctgccattttgttaacagatatagtagtcaatcttactgttttctttttctttgaaataggctgctgcaaaggtatgttctttgttatctcggctctctgctcagggtagccatgaaatggctcttttaaaaatgtgcccagataattttgaaccatttcaaaccatattatgtgattttaatttattttccattgcattcactaactcatttctgggtgatgtatttaaaagactagacagaatttacaggtttaaaaagttacattaacagaaaatgtaggtgccagttgaaatactgtcaactggaagtgctaccagcaatgtgctagctggacaatgggacttgtcccatttttttgctgggtgacagctatcactgcctcagggaggctggtgccatttaatgcctctgataatcagaataagtaattgtggcttctgggtctgtaaagccacaaaatacatatgcaggcctattttaattgacggtaagtcatgaaatacactattttcgtattaagataacgtggatatgttatggaacaaagttaaaaattagcatgaatttttaaagtactactggagattgttggctttaggttcgtgaaccccattcctgcccccacactcctgttagtggggctaccagaggggccagtatgaaaagcactggacttacagatgaaagaacttgagctggaatcaattcgagtcacttaccttcgctacaggtgggcagaggagtcatcctgcaattttgttgtgaaaacagaatgagataatataaaatgtatttgaatacagtgaggtctgtacagatgctgaatctattactttgcagtaggagtcaggtgtggccccacttccccaccttcttacctacttgtatcttagatcttatatatattgatattcacttttggtggactaaggttgtctttgttgcaaacctggactctcttgtattcttgctcagtgtgtgtatgttaatgttagataaagaagattaggctggtgcattggctcacgcctgtaatcccagcactttgggaggccaaggcgggcagatcacttgaggtcaggagttcgaggccaccctggccaacgtggtgaaaccccatctctactaaaaatacaaaaattagccaggcatggtggtgcctgcctgtaatcccagctacttgggaagctgaggcaggagaattgcttgaacccaggaagcagaggttgcagtgagccgagatcacgccactgtactccagcttgggtgacagagtgtgatcctgtctcaaaaaaaaaaagcagaagattatttggaaagctatttttaaattattcttcaaacatatactaaaatagagaagacaacatgagagccaacagcataatgaaaccccatcactcagcctcaaccgttgttaacagtttactatctttattgctactgaaggcagttaaatatttcttggcagtccttttttatttagcatataccatcagggatgacaatagaaacaggtttcaaagtcaggtgaaataatgtttctctatatgagttcaccactaacttgatacacagtttatgtttatgtttatgttcttattacgttcgtgtattaaggcaacctttcatccctgccccctaataggtaactgtctttatttgttctgggattatccctcctccattgccctttttggaaagagtatggatatatttgtattttctcttactcataaagcagcacatggtacatactgttctgagccctggttttctttttttcacttagcgttgtatactggaactcactcaatgtcagtatacagagaattcccttgtctttttataactctgtgctatacgctgacggaagttcattcagtcagtcccctattgatggacacttgagttattctcagacttgtccattgttttgcaaaaatagccctgggcatatgtcatttggtatttttgtcgaggcattccaataaaaataagtaaattcttcctctcttgccttgaagatgtgcagctcctcagtaaccttttattctctaaagctctgtcctcatctttaatccctgatttaagaggtgcagctcttcaggccataaacctttcttcctgcctcaagtttttaaagctacaaaggaacctaagagatcccttgtgttttacagctaaaggacctgagagcaggaaacaaagggagagccggaagcccaggtctcctgttccctgcctggcaggtgatattctttctgttaaactctctttccctctgcctattattggccaggctgtcctccaggacagtgcttgccaaagtgtggtccatgggcagcagcatccccggagctcatcagcaatgtaagatgtcaggccctgccccagaggggctgagatagaatctaccaattactggattccctgggtgactcatgcagtcaggttggagaagcgctggactggtggctttctccagaggagcatgcaacagcggtttgcaaacagggatgatgcagttccttttcaacacgtggatttgcacttcctcctggtgcgctcctccagcctgcctgtcctgttcacaccagcctccccctggaaggggttcagacttgatcctttgggtggtagggtctttcttggatagcgtagccatccattcctgctgcatacattcaacacagccttcatccttcgccatttgtctctgatacttcatactccttttgtttgacaagtgccctagctttatttattttctcatcattgttgttaagggcctattgtgcttgctagtatacacaccactatgtaagttactagttcaatttatttgttttactgctgctgtgaggtgtgtccatgtgtgcacatctacctgtgttaataactgataatattgggcctcagtacatactttttttttttaagagacaaggttttacttcgtcacccaggctgaaggactgagacacacttgtagctcactgcagccttgagctcctggacccaagtgatcctcccaccttaacctcctgagtagctgggactacaggcacacaccaccacaccaactaatttttttattttttgtagagacggattcttactgtgttgcccaggctggtctagaactcctggcttcaagccatcctaccacctcagccttccaaagtgctgggatgataggtgtaagccgccgcacctggccctcagtgcatacttagatatacttaaataaaaacttaattgcaaattacttcttaaattatccacaaactgacttggcagtaaaagtgactacaagtagtgaaaccactgtcataataaaaataaaataaaagtctttattgttagatttagtatttctaatctcttacatttcagttttggaaggtaaatttttgggaagtggtggtaataatctaagtatgtctagattcagtgatgagagctagtacactgtaggaaagagttgagcataacaatatggaatgttggtaaatgtataggggttttctttttaaagacagctttttatacaaagaaacagatgatctttttttttttttctaaactatgttagctatacccaaattagtaaatgttaaaataaccatgactggtaaaaacattttgcaattttttttttttttactttttatataattaaatgaaattctccatttggtagttgatctctcagacaaattaagtcttgccagactgtctgagaagactagtgaatcagaccctaaaaacttgtagcatttgaaaaataacaactgtgtactgcaatttataagggcataattagagaaagtttttcagtctgaagatttatactaatcttatcaccctggttttagagaacccagttcaatccaactgctgtgaaaaagccactgcttttagccacagaaaataaccagtttcatagaatgacttataataaaaaattcaaccattttgactccaaaaacctagctggccgggcgtggtggctgacgcctgtaatcccagcactttgtgaggccaaggcgggcagatcatttgtggccaggagtttgagacctgcctggccaacatggtgagacccccgtctctactaaaagtacaaaaattacccagacgtggtggtgtgcacctgtaatcccagttactcgggaggctgaagcaggagaattgcttgaacctgggaagcggaggttgcagtcagccaagattgcaccactgcactacagcctgggcaacagagtgagactccttctcaaaaaaaaaaatgcctagctgactttatcatagatctgtctgtaccttgtaggcacaaatatatttacaaaataattaatggtgatttacttattcacaataagcagttattttgcttttggtgtatatgtgacaaggtggttatgtggagtacataaaggagtaaagtaagtccgttgacttcaagatgcttacagtctaatagaaaccttgaaatttccactgggcaaggttttcttgggattgctccaaccaaatgaatgagcaggcgtctaagtaaatgaaaatcactctcatcactttccttcacattatgttaactggtgacaggtcatgacgcatgggaattgcttatgtttctgagctttagtcttgtaaaaataagtttagatagtccatcatgttcttcacattagacactcattacataaaaggttttatatgtattgtagatctttctgaaggtcatctatgtgaatgtttaaaaaagaagcaagaaggtgctataaaaagcactagaggtcaaatggtttgcgagacaaaatgaaactctccagctctgaaatccaacagagtatgatgaagaaagggaaaaaatagatcaaaaaatggcaggggaggaactcggcatcaaaccagtgataaagcagaatgtggatcagatccagacatccagtagtctgtgagcatctccatatgggatgtttgggttgagagttcaacccatcaaatacattttatccataaccataagatattctaagatcgaccaagtagagtaagcaatgtagaatcaaaggtatcatctttattatgtcctatttgtgtttcctgcttttgaggttcttagtccttttaattaactcctaatgaactaatatagttttgtggtcaccagcttctagctagtacaggcacagttgtgggttggtaggagaatgagcagtaaagccatgagctaacacaccaagtaatctgttgtgttcacaaatgtccaaaagaataacagagattaaagaaaggtaaatacagccacctggcaaaaatatttacccttttaaaaatgatggaagttatatatagaagaaatgtttttggtaaaaatatttgaaagtttgttttataatcataagtagcttgggctattttgactagaggggtgtgtgtgtgtatgtgtgtgtgtgtgtgtgtggttggcagggagagaaggagggaggcaggcagctggtagggactgtggagtgtgtcagttgggagagggaaatgagatgattaagttagtaagaatagaaaacatgtaggaaggcggatcttgaaatttcagggctattcattagtcattagttgaagatttcacagagaaatggtagaaaccaccagtaattaagaaatagcattattgtttaaaaaaaaaaaaactcccaaaccctttccctggcattctggtagaatatagttttggtctaacccaggtcccctctcatttcctttcacatccccttggttctagccacgctagactgtctgggttgtctgtatatgttctgatgtttgttttcctctgtgctgttcttctggcctcagaatcctagtgtccttgtgcctccttctgcatatgtctggactttgcttagctgatgagatccagttcagataccaccttctgtacaatggcttccttaattcctttaatttctcttaattgcaataaagctatttgcagaggaatgaaagatgctcccctttgcgctgggtacaggatgcactgaaactttcagcatggggcgcggtggctcatccctgtaatcccagcactttgggaggccgaggcaggcggatcacctgaggtcaggagttcgggaccagcctgaccaacgtggcgaaaccctgtctctactaaaaatacaaaaattagccaggcatggtggtatatgcctataattccagctacttgggaggctgaggaaggagaatctattgaacccaggagacagaggttgcagtgagctgagatcgcaccactgcactccagcctgggtgacatagcgagactccatctcaaaacaacaacaacagcaacaacaacaaaaacccaaactttcagcaggagagtagcttggttcagcccagcaacatcggtttgaagattatatcaagttttccagtcaaatgtaaccagtttatggatctgtgtttgcacggggtctgaacctcccctcctcaggtataagctcttggaggacagcctgctgcttaaggtacaggagaattcatctttgctggacatggtaacgtatgcatagagatctggcaacagaacttaagatatgtgggagaaataataggcaaaaactggaaagagcacaagtaagagaagagaaatccgcagaagtgagaagtaacagaattgctggctgaggttggaggcatttaagtgtgtgggtgtttgtgggaggcatggtggtctcctgttccttgacctcattgggcaaatattacagcacgaacatacaggtaggaatcaattgcatccccacctgggcaccttcatcggcagttggggtacaccacttgctacagtgtgatggaataagggacgatccaaaggcactcagttctcccacccatcctgtgcacaaggaaaagacctttgaattgtgtctcccctgttgtcctttgcattgtgaaagtgcatattagttctcccatccactcttttctctttaagctttagcatacggttgtttgccaagaatggaatcagatagaatattttcaccaggaagtgaaatttaaagtgcttgaaaaagatacaaggatatctggaagttccaaccggcgccattttatattttaaccatgacaagtagctgtatatcatggaactttggaaaacagagattgttccatttatttttcacagatgaaaaccagagtgctgtgtggggatcaggaagagggaaatcaaccaaatgccttattttagagattttttttttttttctgggaaattggaaacagcgcttgtttatagccaatgcagcgtccttgaaactctcctacttacagttctggagctgtagtttcctccctgaagaatgggttaaggcaggcagggtaatatgcatagatgggagtgagagtggatggcctacagggttgttaacctctagtgcaacaggaatatatgaaggtacttgggctggtggtcctgtgcagaaccagccagtaggttctaagagacttgatagccgagggtccctgggccctgttccacctttttaaaatttctatgacttagtagcggcagtaccatgcccatcccccagtgatgtttggggtacagctgcacccttggccgtgcctctgcactcactcacgagtgtcatctgacatctggctcttgaccaggatctgaggttgcttaagcaggatccaggtcaggttttttgttcatggaaggtggaattttggacctttcccccaaaaagttgacataacttaaagagaagggaggtatattgagaccagcctggccaacatggtgaaaccctgcctctactaaaaatacaaaaatagctggcatggtggtgagtacctgtgtagtcccacctgctcaggaggctgaggcagagaatcagggggcggaggttgcagtgagccaaggtcatgccactgcactccagcctgagtgacagagtgagactctgtctcaacaacaacaacaacaacaacaaagagcagagtggtattatttcctcactggaacattaaatggttcctactaccaaagagttcctgttctaatgggggtttaatataatagtaacattttattcactgggattcactcgggggaaagtattcaggaacaaagtgacaaaattaaatataggacatatgaacattgtcattttggttctagttcttacaagggcttatggtagcaacccaaatagaagtatttgctctaactaacagataaattattagcacttcagttgtttacatatgagtcagagcatctaaaatttgttcccataagtaggttgagcctccttctcagcctgttgtcatagggtctaaaaatggaaacgtgagtccaaactctttccagatcataaaaataattctgaattagtagagcataaatgaatgtgattttattcgagtgtcattttcaagttccccaggccaggttgagaccttttaagtcatctgaaattccctgtagggaggattaagaaaatagtagcagctttgcttctggccttagacagttttctaatgaggtcagagcctctcaccctgggagaagcagattcactttgccccttcagcattggtttttgagaattgctgtctgaagctattgcatagacaaggtcactttttaaaagggtacatttctgaacctggagaaggagtgggttctgaatgactggctcttctgattaacagagctgtatatcaagctgtgctgaaaatactcctcagatatattaggccacatttatgcatgagtgagctcactgtcgtgacatgggagtgaacctttgctgattcgagatcctggggtgccttcactttggaacactgattctagatatttaatagcagttttaaaattaggctaaatgtagtctgactgcaggattcattccagtgggaatttttttgtttgttggttagttttttaagcctgaatatgaacccaaacatgtttcccaaaatgtgaaatgaagagtgaaaacctaacaatgggataagaaagataatagataagagattatagttcaaactcggcctgcactcaggaaatggaagcaattcctccccctcatcctgcccccctcctcctccccccctcctcctcctccacctcctcctcctccctttcctcctcctccactacttcctcctcccccttcatcctccacctccacctcctcttccacctcctcctccccctcctcctccccccctccccctcctcctcctctccctcctcctgccccctcctcctcctcctccacctcctactgcccccctcctcttccacctcctcctcctccacctccccctcctttacctcctccttctctttctgcacaccccacccccgcccccactagggacagtttactcttccccctcctttcttagaatgccaacaactagcctgttagttccattacttacttgccttgtgactcataacgttttcatcttgggtatttttctttcttggtctttgtaaaaattctaagcatcatagagcatatcacctggagaaaagacctacgttcattatttaatgaaggtaaaaagtaaagaattgagtctgcatcctaagaaattagaaaaagatcaactaagtaaacaaaaaaatataaaaactaggagggaggaattaggagatgataagatttaaaagttatgtaaatccaatagctggttatttgaaatgaccaataaagtaaactctcattatcctaactcaggaacagaaagaaatcatcctaacttagaactagataataggaatgagaggccgggcatgatggctcacacctgtaattctagcactttgggaggccaaggcgggcggatcacctgaggtcgggagtttgagactagcctgaccaacatggagaaacccatccatactaaaaaaatacaaatttggccgggcatggtggcttatgcctgtaatctcagctactcaggaggtgaggcaggagaattgcccaaacctgggaggcagaggttgcggtgagccaagagcactccattgcactccagcctgggcaagaaaagcgacacttcgtctcaacatcaacaacaacaaaaaagaaagaaatagataataggaatgagaaaggagacacaggagatatcaatagactttataagaaaacattacatgcagccctgtggcaacacatttgaaaatatagggctgacttcttaggaaaatacaaattaccaaagttgatccaagaagcatggaaaagttgaatagaccaattactatagaagagataggaaagatgattaaaagttaccattgagaaaggcaccaggaatccatggatttccagctgaggttttgtttgtttgtttgtttttggagatggagtttcgctcttgttgcccaggctggagtgcaacggtgcgatctcggctcactgcaacctccgcctcccaggttcaggtgcttctcctgcctcagcctcccaagtagctgggattacaggcatgtgccatcatgcccggctaattttgtatttttagtagagacggggtttctccatgttggtcacactggcttgaaaaaatagaaaatttgagtgttatttttactcttccaggacatactaaaacatggaaaggttcccagttcattttataaaaccatcaaaattttaatttaaaaatctgatgaattaaaaaaataaaaataaagatcaatattatttatgaaagtaaatgtagaaatttaaaataatttattaacaaatagactcttgggtgcatcaaaacacgaatgcactataatcaatagttattttccagtaacaccagggtgattaactgttagaaactcatcactatcatcagttgttacacaatcatattgaaggagaggaatatatgaataagtcagtagaggctagaaacctatctgaaaaagtttagtagccattcctaatatagtacaatctgagaaagcgaactaggaataaaaataaattacttaaacataaaggccatatatgtgtacacaaacacacacacaccacagcaaatatttcctaaaagacaaaacactaaagccattcaattaaaattaggaatgagagaagaatcttacattttacaattagtatttaatattatcttagaggttcttgtgagtggagtaagacaatgaaatggtcatatgtctagaaatcgcaagagcatctagtaaaaaatctaaaatcaacagaaacaattgtcaaggaagctggataaaagataggtctctagaaattatcttttctgtgttttgaagataagcacctagaaatggaagttaagtatttctttcacaatagcagcagataacctaggaagacattgaactaatacctgtaaccttcttagtgaagaatgtgaaatataatctagagaaattaaaacatgtaatgcctgaatgtatcttattacaaaattaataagtaaatttcttgtgattccggttagaatttccaaagtggtgggttttctctttaattgaataaaataatcctgaagtctttatagaagaataaatacgtactacctgagaggagccaagacaaatatggaaaagaaaaccggtgagggcagatttggcttacaagtaatgacaacatgctaagaataagaagtcttcgtgatcaaagcaatgtggtattgatccagaattacataaatagttcagtggaacagactagagaatctaggactgtgtctcattaagagagtgaatgtataacaagatgatagttcagtactgttgaggttggtactggcataaccagttctttatctggagagggggttgggggaacagcacagacctctatctaatatcataatcagtaataagtcccggaatcttcaaacacttaaatgtaaacaagcaattcaacttttacaagaaaatataagaacctattttgtataatcttggagtgagggagaatggttaagcaaaatttgatacgcacaagctataaaaagagacacactttgaacatatattttatttttatttgtttattttttgagacggtctcactctgtcaggctggagtgcagtggcgcgatcagggctcactgcagccttgacctcccagactcaggtgattctcccacctcagcctcccatgtagctgagactacaggcaagactcactgtattagttctcatactgctaataaagacatacctgagacggggcaatttagaaaggaaagaggtttcacagtttcacatggctggggaggactcacgatcacgggtgaaggtgaatgaggagcaaagtcccatcttacatggtggcaggcaacagagtgtatgcaggggaactcccctttataaccatcagatcacatgagatgtaattcactatcatgagaacggcatgggaaaaacctgcatctgtgattcagttacctcccaccgggtccctcccgtgacacgtggggattattacagttcaaggtgagatttgcatggggacacagagctaaaccatatcagctaccatgcctagccaattttttgtggagacgaggtttcaccatattgctcaggctggtctagaactcctgttctcaagtgatctgcccacctcagcctcccaaagtgctgggattaacaggcatgatccaccatacctagcctgaatatatatttttaaacttttctgtggcaaaagatacgtgattaagtcatagatcaagaagggatatttgaaacagacatggggttactatctataacaaaaaacttacaaattgttaagaaaaccacagaggaaaaatggacaaagaatgttaatatagaatacacagataacaaatgcagacagctagctggcaaacctatgaaaaatagttcatttttgctagggaaatgcagattaaacaatgagacgttactttaaacccatcagattggtaaaaatagagaaaaataacactttttgatagcaaggctgtaatagaagtggcaagtggtattatttctcataatactgatggaaatgtgaattatgggcagttgggaaattgaaaagcagatgggcaatgtatattaaaataaaaaactatcatacctttcttctaagcaacctttgtcctcggttatttgtcttttagaaataaaaaatgtgtgcaaagtcatatgtataaggatatttattgtaccattatagtggcaaaatactgaaaatatgaaaacccatcagttgaaaaacggccaatttatggactgtttgtaccatgtaatattatgagagaactagagctgtatgagagttggctgtggaggaatttctatgagaacttgatgaatgagaagcaatgtgtagaaaaatgtataatatccagttctaaaagacgcattcctcctgtgcccatatgtgtaaatgtgtgagtgtggagaacaagatgaaaatgctcattctgtatgttaagcagggagtggggtggaggttaatgtggaatggtgggagagtggggtggcagggatttccaagtcactcaccagtgatgagtgttaaccacatccccatttttttcctatgaaggaagctgcaatgctgtggtttgaggttaaacatgctggctccttctcttaggtcttgatttggtttttgttgttgttgttttttttttaattctagtctgttcttgttttgctgtgctgatatcctcttagattttacgagcatattaattgtgagtatttaacattcttctttggtttattctgagaccccgtttgcctgccctttggcatcattggcagtttttggtggtctactggtcttcctgtttgtgcctctcgtttgcccctttttcactggaatgtgccaggttgaagcaatatgtagggcccggtgggatgggccaggaggtggcctttcagatgtggctcctgcatggccctgcttgctctcttgagctgcctgcacttcagtcttaggaccacattcctgctttggcctacatgaagtgcaaggtagcagtgggaaaagcagagaggaaatgaagcttcctgataaatcacctgatcgctgccccagggttagtcactctagcccccttggatctcttgactccatctcttgatttgtttcttttgaatttctggcatctggagaatacttgtacagcagcagtcccctggttttgtttttctttcaacccaagcccatcccatatctgttcatgtgatgatactgtgtcttattttcccaagattcttatgactgtgatatttagtctgaatcagagaaagagagagatagaaatgtacactcagagggccacttggatggaaacttctgttgatctctccaagccttagtgggatcatctgtagagcagggataataacagcgcctatctgttactgttagggttactgcaaagattaaaataggtggtgctcttaaaagacttagaacagtgctgtcatatagtaaggattccataaacattagctgctcggtttgtgtgtgtgtgtgtgtgtgtgtgtgtgtgtgtgtgttttgttgttgttgttgttttaaacgggatcatgctggaaatgatagattgcaacagagctttggggttttttctctaattaatagatctaggatgttttctgaggtgtgtcatgtttttaaaactctgtggtatttctgtttctttctttctttcatttttttttttttttttgttgttgttgttgagacagagtctcactgtgtcacccaggctggagtgcagcgatgccatctcagctcactgcaacctctgcctcccaggttcaagtgattctccttcctcagcctcccgagtagctgggactataggcatgcaccaccatgcctggctaatttttgtatttttagtagagacagggtttcaccatgttggccaggctggtcttgaactcctgacctcaagtgatccgtctgccttggcttcccaaagtgctaggattacaggcgtgagccaccatacccagcctggtgtttcgtgatatatctatgtgtgagggtttctgtagttaagttcccatagttgaattcctggttcaaaggacaagaacatttacaatgttcatagacgttgggaaattgccttctgtagtactgcactagtttccactggctgtagtggttgatgagagtaccagtttttccctagttcaatattaacccattttatcagtcttttcatcttcgacattatggaaggtaaaaacatctcattttatgtcttcagtcagtgatgccaagtatctcttcgtgtatttatatttccatttttatccagtgccaactcacatccttctgtcaatttttcctttgacctattaatttttcattgataagaattctttgtaaaatgggcagtttaactccccatctgtcatatgttttttctcatttgatttattgtatatcttgtatagcaccttttaattttaacattgtgtttttaagtgtcttttctttgttgacttggaaagctaacaactacttacagcataatttccttctgttaaaaacaagaaggaatttccccactctaattgtgaaaattatacatttttctaagtctgaaaaaaaatagaggaaaaaacagaaaaaacaacagaaagaacatcagtcactcttaatattttggcattttccttttagttgttttttaggagagaatgtatatttatacttcgcatcataacatagatatagtctattttggtgatttattccaatatgtaatatatgtttctgaatgtacaatatcctatttatcatatctgttaagtttgtttccagtttttcatttaagagagaaaggtactgggaatatctttgtgcaaaacaagaatttttttttttttttagtcagattctgttcctatgatacctccctggaaatgggattcctaaattaaagaatattaggatttaaatacttttggtatagattaccaatttgctttcctaacgtgtggtactagtttatgttgcaatcagcacaaagactcactgtgccatttatcatcagcagagaagagagcagccctgaagatttgggggaggagtgttcgtagagaggcacgtgaaagtgagtttgagaggtttgagaagtagccaggtcagtggggctggggaagggagagagttcatgggggagggctggagatgaaggtaaaggagccatggttctttagggctgtgtgggtgctggggaatttgcatttcctgcttaaggttgtagtaagtcagcctggagagttgcaagaaaggagtggcttggtgtgatttattgtagcaagtgagagtgacccagaggccagttaggaggctgttgcagaggcctgagtgagagaggatggtttaaacaccaaaatggtaacattcagaatggagaggaggagatggtgggagattaaatttggggatggagcccttaggatctgttgattgactggatgtgtaagagagaaagggaagagcagaactgaggaaatgtcctcttgaactggctgggggccactgagatgggacagatgcgctggggagcagtgcagaggtggaatcactgctccttttaggtctaaggcatcccttagatctccaagtggatgtgtgaagatggtggtagaggagaatggagctcaaaagaggggccagagtcatttccatttagatggtctttacagcctaaggaactggcagatttcactaaggttgaggtctttctttcctgtgaaaatgtgatcaggatcctaagtaacagccctaaaaattaaacattaggaatacaaggtttcataaattaggaactgtctgtagctgccagattctaaatgttttgaggatacaaatcttggggtcttttcaaatgctttgagcagaagaggtacatcgtattgtgtttactgaatggcatttaaagatgcaggagacctttcccccttcttgatgaaacaatttgcctttcagatgttttgttatagtgagttgattgtaggaccttatgaagcatgtaaaccacacatttgtaaggcattggaagaaaaagctaacgcgagttaggagggatttaagaccatgtgaggaaattcaagcctatgttgttatcaccaaaccttgcctgtgttatgtaaagatttttgcctgtgtcatgttatcttcgttgtgttcaatttattcctccccctccaagtgtcctagtttctcctctactgtagctggttttgaacaaaatagagaaacttgggtctcctctaccctcagcatctgaattcttctcatttggttactcactgtgttaaaataagtgatatagtacattcttagcagtttgtttatttttaattttattttttatggggctagggtctcgctctgtcacccacgagtgtggtgccatggtgtgattgcagctcactgcagcattataactcttgggctcaagtgatcctcctgtcttagccccacgagtagctggtattacaggtccatgccaccatacccagctaatcttagcaatttttaaataacttttttttccgactgtaacagatttagatattggaaaagataaaacataaagcattgatctacctgtagagccaaatagccacagggatataaattggttaccatttaattttatttccatctatatttggctatatttatatttatgtatatggaaatagtttatgaatttggaatcatactatgatattttttagaatgatgctttttaaactattttatggtaagcattttagtaaagctcgtaatgttatttttaaaaacgtacttttcgaaggctgcagagtatggataaattcatgatgactttttagaggaaaatatcaagatgatctcactaacaaatcctgagattaaaaacaaaagcaaacaaaatacaaaaactgaaccatctttggaatactatgaaattcagattttatgttcttaataaaatcctgttttgaatgaaatcagtcttcatgcttttcttattccttttggctatgttgcctacagttgaattaactgtttttatatacttcctttgctttgcattgaaacaagctgatccattgtgaccctttgtggtatttcataaaaccacaccctaaaaactgcccagtcttttaagtgtagtcaacagtattgagcaattttttgggtaatattgtcggaagtgttaggtgccaaccaacaatggcttattgcttacatttaagtgtaagcaatatacaattaaaggaatgtcatgactttttaacttcattttgaaatttgagtttagaaaaaattccaagggaaatgagcaagaatgaaagcatcctctcctactgccagacttctgggagacccacccctggtcttcccaggtgtctcttcagtgaccttgttggtcgttgagggctgtggaaagttctagggaggctgctcgtccctcctctccttttgcttattgcattctgcccagattataaaactgaagtatctgtcttaagacgccagcagctttttcttcatcaaatccagacacatcgaatcccccacaaccaagaattacccagccacaaaatgtcagtagtgccccggtaaaagaaagctggttttagacttagtctcagaacctggccatcttccatggattatcccgatatgtgcatccttgtctcttttcactatagcctggtgatcatggtggcagttttcattttgggacactggtgaggttagaatagcttcaggcttccctcagtgaatagtattgtgaaggcagtggtggtaacattgtgttggagctggtgtgagggttgaatccactctgtagcctctgtccctagatcatggcgctgctttgattgggccctaattttctcctctagacaaaaggaattgaactaagacttccagcattccctccaggcttaacattttttcatttggtgctgatggtcactgactattttccagttacattttaatgcaagtttggcagaagccgatttctctgggttagggaaaatgacataggtggcagggaggtggatgtacaccatttgtttgatcagtttgcctagaatggaggtggcagaattggagttggaaagatcaaatgtagcctttttttcccttccagaatgaggcttttctatgcatttttttgaggcatgagaacctcatgggacaaggcaaaagtgagcatactcaagtgaagtgtatggttatgggggaatggttattagaaatgtcaattgtctcaattttttagtattaattttcagagggaaacagtggtgtaattagtgttgtgattgtttgccagggcggtcgtaacaaagtagcacagactgggtggctcaactaccacaaatttgttttctcagggctctggatgtccggagcctgcgatgaagcaggattggcttcttctgcggcctctcttcttgacttgcagatgctcctctgggtcttcccaggtcatttgtgtacctgtgtccgtgtcctaatctcctgttcgtataagggcacagtcatattggattgggacccacctactaacctcattttaacttaattacctctttaaataccctctctctaaatacagtcaccatctgaagtattaaagacttcaacttaggaattttgggcaaatacaattaagcccatcacaatcaggtaacatttggtaggacgtgtagatgctttttatctttaagggaataggcaaatcgttaaaaataaataaataaaaacttgttcaacttgtttaggtacattttcttatagtgtattgtggttcttatttttttaaccttccagctagtgtgtaaattggaaacattgtagcttaatttgatagttttagacataatcaaagatgatggaaatcttgttcttaaatttagtctattcagcaacttgtgtatcctcaactgctgaagactgaaaacttgagatgttcctcttgttttaagaatttgactgaaaacgggctgggcacgatggctcatgcctgtaatcccagcactttgggaggccgagatgggtggatcacttgaggccaggagttccagaccagccttggcaacatggcaaaaccccaaaaatacaaaaattagtggagcgtggtggctcacacctgtggtcccagctattcaggaggctgaggcacaagaattgcttaaaccccagaggcagagactgtagtgagatcgtgccactgcactccagcctgggtgacagagtgagaccctatctcaaaaaaaaaaagactgagaatggttggcactgtccccctgtctccaggagggtgaatgtttctagctgaaccctggtgcccacttgctcctctaagccttcagcagtcctcccagcctcaaggggtgatccgttcatcttccccccacctctggaaatcccagcgtttgaacgctggggggaactgcaagtctagtttacagggtttctcagctgagatgccaggaacacttcgcgagtgagcatgccaccacatttgagtgcatatagaaagttagctgtttgctacaactggggacacttcctattagagccgcatctgctggggtggagggctgcatgggttggagagtagggtgtgacttcttccagcaagaggaaagagaagtagcatagtgcccatcgcaggcagagagcacatgtttgacttgctcttggaatttctgtagagtaagggtggtcaggttgccagactacccctcaaacgaggacatggtgctgctgggtcccagggtagagctctgctggcaccttcaaggccctgatttacacctaagggcacacaactgggatctgaaaactgggatgcacagtacagactgcagatttacagggcggggctgtctctcatctgactattgattcttttgggggctgtagtttgtatcatagttatttttgttcctgtttttttcccctcttcaagacaataagcttttggagggccaggaagttgtgttcccatctgccgagtgtggggcctcgagggccagaacctcagaatgtagaagctgagttagtttgtggcagggtgaagggctgacctctactgttggaaatgccaaaatctctgatctggctttaaataagcaaaacagccccgccagacatagagtcatccacaaaacctcatgacctctgttattgcccatcctgtgtggaagcccactgagaacttcacttgaagatgctgcaggaacaactgcagggaacctggagataaggccccgggtgatgatgtaagctaattgctgagctgggtggagctacttaaccttatggtaggaggtggagcttgacgcaacccccttttccaccaacaagcatttctttctacctgtcattgaagtgaatcatcagtataagtagcgagctgggcgcattccttctcagttgtgttaaaacttgctggtattcccccggtatcagcagaggtgtgtacgggcactgctttaaaactgggaaggaggaagacgaggccagggagccggagggtcaccaaggtagatttccagcagcgctagtccagctgaacactttccagccttgtttttcagcagctttgaggaaaagtataggtaagaacaaagacaccactgtatgtttgctatatgaatgcataacatctgttcttggtgtgagtttgatgttggtttaatactgtttttatgtcagcggcatagttctagcatgtaccaagattttcaattttaaatgctttttggtgttcacagttagctataattggtcaattttaccctccttatgcataaaaagaatgataggcaaagaatgagccttgaaaagaattgggatcagaattctggtcccctgttctttgcttcttaactttcttgactgtttagaaaaatgtacagcttttcttccaaaaaccaaagcaataatacttttatttttgaaaataatggaaaacagagaccgctgaagttctatgaatgaggttttctgttttagaaatcacaggttgaggaggaaagaattgtgttttccttcctgttctgtttcgagtctcagtatttctgacttagaaacctcctggagaagagggagataccagctctcctttgtttcaagtaaaataccatcttaggtcataaaatagtttgcttggagaataattcatggcttatatctgaatttttggttggtagcaacagaaatctttctcttcctcggtatgagtaatttggcttacatgatttagactaaattttattatattttttgtttgagaaaacaaaagtcaaagcccagaacatattcaactgagtttttccctcaggttttctatcattttcccacccttcctactcatacatgtgaatatgctgaatgattaacatgtgatttttgtttctttactgtctcatttcatggtgattcataaactgttagttaactggttatagtgtatccatatgttggcaaagcttgaaataaatttgagtgcaggccacaccttcgtattaatgagccgggttactttcagtaaagtatttctgatgtcattaagtgttaagatggccggaattctaaagacaataaaaatgtatcaacaatatgaaatatcaaagcctacagtcaaatctgagttattctttagtacttatttcatagctattctttaatgtttattctttaatacttatttcacattgaaaagtactttacacatgtttgaatgagatattgccagtgaaagaaacaaaaggaagcaaataactctataagggaagtgggattttaaagtatgtttgtgctggccccaggctggtgagtgagtttcattagcaatgaccaggaagagaaagaatgccacagtggtgggtgctgaccttttttttttttttttaaaccttttttaatgtctgtaaggaatacaaggtgaactttaattcttgtgggaatctagtaagatggaagtcaagaagagaggaagaaatgctttttatttagttaagaggaagtaaacatctgtattagttacagatgttatgccttaacctttttcattcctattgtttttatgaaaatttgcctttttaagttaaatgaaggttttctggagtcctgtattgcaactaaatgttgatttaaaacgacacatttgggacattttcttggcactgtggaatataatgaaaagatataaaatgaaggcaggtatgaaattatatgaattctgctacttgagtgtagaagttttattccaaagtggtttgtttggtggatgtggtgatggtggggggctctatgtacttattaaggcaagtgatgggacaggagcttttgtggtcttgacggttctgttgggatgggagggttgtttgggatttttatgtttcattccaggcaatgtttattttttcagcctgtacttcttagggttttaccaagtcagttttcatgtgaagccattttcatatcgtttctttcaccttgatggaaatcttttccttcttatgtgctttgagttaaatatgatgtagtgtgctagtaacatagacggggctttcctttctacaggtgggcttgaagtgagcctgccactcgctcaccttgaatcacggaggtttcagaggccgttggccttcagggcaatggcagaagcacatgttctctgctgttttctgagtctatcttgactgcgttcccagtggcccagaattccccaagggtcactcgacacaccctcgtctacagtaaatatttgtgcttcctctgtgcctggccaggttttctcagtacccaggagcacaggtgggcagtgggatgtgggcaggcggtacccagattccctcccacaggggccacagggaggacttgggcgcttcctgccaagagccccctgcccttcagactaagtggaaatagagatccgggagtccagtggactcagtggagttccgtagaatacatggaaaacgcaccgctttcagtgatgtaagctgtcttgttcacttcacgattactcatctggcctgcagcaggcaagaggatcacatgcaattataaacagcctcctctgactaaggtcagtgactggaaaccctgtcacgttatcagaggtcatttggtcatagattcttgggcagaagccattgagagtcctgggggtgtgatctttgagcctttgccagtgctggggtttgactccttttagctcaattaactgggtccaggagtttattttggccgagatctgccatgctgagttgacaggcttgacactggaaggaagtctctaacttcattagaggaaatggcgtggcaggctttaaggcattttgatatactccactttttctctcttgccctgttttgttgaggttttcagggccataactgtacctgaggttaatcagtgagtgatctatctgaaaggaatttgttctctttgggcaccgtcctgtgtggtattatatttgtataactatttagcttaactcattcaaaaggctatttaagtcacttgtcctgttcattacttgaaaacaagttgtcttctctttattcttttagtcagttaccaaatatttcctaagtgtctcttgtgctagacattgaggggcactccttctccctttcacttgtctgtttttgttgagctacattttttccttaagtcagattgttcttttcctgttacttttgttttcacttgatttgtttatttatatttaaatatgtactttaacagtcttgaagcattggtctgaatgaggatggtgatcagattgggaaaatgccccttaattttggtttaaaaaaatttattttctttaaattatttgtttattgataggggccacccactccaggtgagtggtttctctgtgtgtatggcagaggaatgctctgtgtctggaaaaaaaagtcacttagcttgaaatattatgaaagctgaagagtacaaatgtcagagagaaaggggtattgggggggaagagaatgagaagacaagacacagtcagggccctgtcacccgtgtggaactgcaggtccctggagagatgatgcatttatccctttttagagatattgccattaaaagttgatcttgagcatgacacagaactgaaagctttgatgacaaagccagcatctcagtttagcaataaccaggttagggaaaaaaccccagaaactcaacagtgagattcagctcagcaatgtgggcggggaacccactgtcccgccttgggcagggagcagccccagccgcttcatctgcctgatgctgggttttatccgcttcacaattaaatttcctttttgttatgcttgcgcacatctatatttggctttgcttcttattttttaagaaaggggagaagtgtgggcaaggtaaaatacagcttgcaagctcccaaatggcaaatgcaccagttagagtctaagtggcctcccaaccttaaggtgaaattcatttattcagcaaatatgtaccaagcccatcagggaccactgctcgagataccagtgcaaatagaagaggccaagggcacattattaggtccggagccagtggcctgcacagccatctgtgaccacctacctctctgcttgcagggaacttcagcctggtggaggagacccataatagccaagtcaactgataatagaattagtagtagtgttgagggacataaagaaatcagggtaaggccatcacaattacatgggtggatgatcttttataaaacagcacagttttgttttcttctgccatggtatctcctaacattttccagtgtgtctacttgcagttaatatggaagttgcggctgacactaggttagtggttaaaagaaaacaagaaaaccaacctttagaaatctttagaaacatcattatcatagaaagctataaactcttatgtatagaagggtaagtggccattgatcttggagcagaatgaatggatatttcctggaaaaaaatatttccactcatcaaagatactcaagtctcttctcatctaatcaatattggaaactaggaatatccacgcctatggaatatcctcagagagaattaattattctgccctctaagaggtatagtagtttagacttagaagtaaaggcctgaacttgaggctgcaccattgaaggcaaaagtgccctttatctcccagctttgtcatttgccaaatgcaattgtgttaaattaagtgacctccaatagcagagctctatgttttctcccctgacccccaagtcaaaattgattatagtaatccatcaaaccaggcctggcaaatgatgttttgcaactaaaggataaatactgagggggagggacgaatgtgaacgcatatgcagagcaacacagtcatgagaccattctattacttcctaaatttcttaaagcttttctgtcttttctgagcttctcaagtgagcaggggcatgagttcctgtgttgtgcctggggacagggaaggctttgggacctactgtggtcttaagtctgagcagtgctaatagcctcggctcaccaagtgctgggcactgtgctagagggtgtacaaacctctcatctcatgaggcctcactgctacagctgacagagatgacatccagttgtttttagttgcacatggcagagctagaaaacaaaccagggtgtgtcagactccagagcgcatgccctctgtgatgccgctgtgttaccctagatcaaatcaaccaagccatccgttaaaaaaaaaaacctgatctttgtcaaatatgcaattgttatatttttgttagagtctgcctctccagtgaacgatattaatttccttcaagtggctactcacagatatcacaaaatcagaaagctgcctaccctgcagcctgtatctgcctccacgtccccacatcagtcctccttgctgtgcttcttgtctctttagtttttatcatcttctaacactgtgaactttagtaatttattctggattgtttgctacctgtctccccttggtaaaatgtaggctccgcagaggtagagcgttttgtctgttttcttcactggcatatctcaggtgcctaaaacaaccatgccagacatgtagtggtgccagtgacaacttgttgaatgaagaaatgggagaaaaaagcagaccccggagacttaggagggtctgtgtgagggagtctccaggcagtcttcctgggggtgtcctgaaggacctcctgatcgtgattttggtcagtgtggaggctgtggtttcttctgagctgtcagtatttggaggtgagttgtctgcaggtcacctcatcccacctttacacattagtaaaatggaattcgctgggtgattcttaggactgtgcggtcagtcgaattaccagacgtccctgcatgctctgtctaagggctggagtctgctttccttgcttctcttctagaaagaggtctgtccacaagggattagcctcgcgaagttcctactgttgttcattgacccagtgagtgttttacccactgtgggtttttcctacctaattgcccctctggttttcagtgttcaacatgctgcagttacgtgttctgctgtggttttacttagcttaatcctttattaattgcctcttgttcaaactccctaagagcagattatccttctctttcagcttctgctccattgctgttgaacttttttttggtcgtgacatcagaaaaataaccaagtgtgagtctgataatagcaagtaaggctattttatttctatccaatttaccccaaatttgagcagtattacaccttaaaataatagagctggctcttgcccagcatgtgaaaagtgtatgcttcacgatggacagatattttccagtatctacttaccataaatctcaagatttaccctaccccactccagccattacccccatgtcccatttgcctaacctaccctagggccatctcagtgccctgtaaagcaacctttgttgcagacccactgtgtgactggaatgtgatgcacacaagtgaccaaggcatggccctgttcgcaaggagcttccagaccaatagcagaaatggacacataagtaaacaactgcgctactgataggcttctgccaacaggagtggagcttgagggccaggaagccttcccagaggcactggagcttgttttaacgttacgtgcatgccaggtggggggcaggacatttctagcagaggagaaagcatgctgtgctctgagaactaaaagtcatagtcactccacttggtgacatgtataaggcacatggaatagggccagagctgggcagaccgtgtatgccacaatagttcgttgtaggttacaaagaaccagtgcagagtgggtgaggcataggctatttgattaataatttggctgcattgacaagatacggaaaaggcgaggttgggactttccgtgaattttctcctcaaggtgcttaatcagtgaggttgggatggccggagggggccctcatttgcttgcctggtgctcaagcctgaggtcctggcctttaatagtcagggaggtctgtgtggaggcagggtgtgagccccctccaaggaaagctgcagtgtgaaaagaggcccaggatgagcgttggggagtatccacatacaacttgatattcctaaagtctcagttctttatgggaaagcccatgcactcttccacacttggaattctttgcaaagtgagtggtatttgagcttctttagagtcttgctactcccaccagctgtactggcatcaccagggagcttgttagaaatgcagattctcgaggcgcggctcacaactacccaatcagactacattttaaccagatcccaggcaatccctgtgcacgtgaagtgctagaacactgctctgcggtaaaacgactttgctaaccatggaagagggtgatttttttcccttttcctttggtgttttttataggacctatttaccttttagaactttttcagaattatggactgcagaatatatacagtgtcaatgtcattagcaattcattagtgatatttggctagaatacatagttgtttccacacaaatgccatttcttacattgagatggcacatgtctggttaggacttgggctcatttgtaaggagccacgctgcaggtaggcatgctcccgggacattagttgctcaggtttcaaactgctgccccagcatagcagatggcacggtaacaaagtccctgtgcactctcacattgcctgcggtgatctatcacacattttgtcccctaataacctagctgggggggagctcatgtctctgtttgtgctaatgctcgctgtatccccaagtggcagtacttaatataattgtcattgctctttaatattatctcattccacgtcagctgcacaaaaatttgaggttaatcacaatgaatgttttctcaatccttgttattgagagctgtttaatagtttattttgtatgtgaagattcatatctagattgaggcttatacaacttcatttaaagacagctttttcggctgggcgcggtggctcatgcctgtaagcccaacactttgggaggccgaggcgggcggatcgtgaggtcaggagatcaagactatcctggccaatatggtgaaaccccgtctctactaaaaatacaaaaattagctgggcgtggtggcgggcacctgtagtcccagctactcggaggctgaggcaagagaatcccttgaacccaggaggcggaggttgcagtgagccgagatcgtgccactgcattccagcctgggcgacagagtgagactctgtctcaaaaaaacaaaacaaacaaacaaaaaaggaaagctttttcaggttggaaaaatatcaacagcagacatgaaaaagcatgaaaaatgacgctaagaatgtaagcaactggaaacaaaaattataatggtgcatagtgagctgaagatctatatttaaatgtgaactcccctttcagtttataagtgattactaacagcctcatcaggtttctggaattaaatgttttattatttcctcccaaagttagtcctcaaacattagtatttcttgtgttcttttgatttgaatatttgtttttaacacacaaggatatcaactctataagtcagttaatatgttcatgcttttagttaatcgaaagtggcttatgatttcagtttttggtatcaggtgatgttgcggaagtgaggttcactgtgaagcttcttctttttttttttttaatcattttgttgtttctttgagtgtatgtgagcttataactcaagacactatgtgaaatgaccctgtgtttcctacattatagaaaagaggaaaatgaagcaagttcaagaaaattagatttatgtggaaaataaattctgcatctagttattcattatcaggtatgagattacaggcatgagccactgtgcctggtgacctcatttgaactcgattacctctgtgaagaccctgtttccgaagaaggtcaacattctgaggtgccattgtcaggtatgaggtaaacacactgagaataccacattttggcaactcagacaagactattttccaaacatgtaaccctgggaagaaggtaacctatcatagtgtgtgttaagaagtcaagcaaccaagaaatgttaattgaaggcccgttttgtacaaggttgcatggaaaagacacactagcgtaagacatggacagtggccctgagtgacgtgcagccggtttaggcgaattaagatttacatacttgaaaagggacaaacaagtctggacgtggtgactcatacctgtaattccaacactgtgggaggtggaggcaggaggatcccttgaggccaggagtttgcaaccagcctgggcaacatgggaaaacccctgtctctacaaaaattaaaaaaaaattagccatgtgtggcagcatgcccatagtcccagctactcacaggggctgaggtgggagaattgcttgagcccaggagatccaggctgcagagattgtgccactgcagcctgggtggcagagcgagaccctatctcaaaaaaaaaaaaaaaaaaaaaaagaacagaaaaggaacaaacaacagacacaagattccatggaaaagggagtggtctaagtattcagactgtaggaattcagagagtggagaggctggttattatgggggtgcttcatcctggggagttgagggaaaggaggtgctggctgcctggagcctggaagaatcaaagatttccaaggccatggggggaaagcatgaaggatgagtgaatagacaccagggctgagcaccctgaaaactgtgaagatactagattgacctgtttggaaaaccaaacagatgtggctgttattgacaagtggttttgtttttgttttgagacagagtctcacttggtcgcccaggctggagtgctgtggcttgatcttggctccctgcaacctccgcctccaaggttcaagcagttctcctaccccagcctcccaagtagctgggattacaggcatgagccaccatgcccggctaattttttgtatttttagtagagatggggcttcaccatgttggccaggctggtctcgaactcctgagctcagatgatccacttgccttggcctcccaaggtgctgggatcacaggcatgagccactgtgcctggccaacaagtggtttaaattggattctccatttcccacctaatagaaagtcggaagcatagggcaaaagtaaaggaaggaccctgtgttctgctggttaaatataacagaggtctgactccatggctattataggagaggtgcattttgttctatgtaaattatcttgatgtgtcccctgtgcctttaccccatgattatttagcacttttttctccacggtcacagggacagggagaaacatacacccataaaacagtgtcatctagaggcaaaaacttgtaatgctcaagcatgtgctctgacgaggtggggcagggtgtgtaggaacaacactctactaattattacagagcttgctctgcactctctgtagaagtccttcaatatccagtctaacacacacagtaacttaagagaggattttaaaaaatcaaaatgccctcagatttgtattggatttaaccaggctgagatccctgagatccaaatataataatgtgtcctttttggatgaatcagacacaagcaaaaatctccagtgtgtgtccagctttagaggtgtagtaatggattccacagttcacgctggtgggccagccaagacttttaatgctgatgtgggcttcattctttctataaactccctttcttcttgatagtgcatgggcccaggggttccaaacatgggtacctgccgtaattgatctgtgtaaccggagaaaatacatatcctatggcacccttgtgtcgggatatagggggcatcaccgtaatgtggctctttttctgttgattatagttttttctttctgtgatcacacaattgttttatcctcgcttaaaaaatttcaagaagtgcagcactcagaataacagaaaagtcaggtgtctggtggtttgtttgcacatttaatagacttgaagataaactctctaaacatttattttgcaagttgtttttctgagagttgaggggaaacttttgccctttggtctccctgaggaattctaggatttcacaggtaggcgtgtgttttggactgcaggctgaacgtggttggcagggtggcatgaggagggcacatattttaagcgttcttagggcagatccacgatcctttacctgccatttctaagtccaaaaagccctgaaaaccaaagacatctttacaggtttgtaggaaattgatttgagagcaaaacctgatgtgaacagatttgagagtattctaggcatcttgtataacacttcattcaatgctttgtgcctcttgctgcacagatattaacattcacttatgggccctgccccatcccctactggggatgctatgcaataatcagaataatcaaactaataataataataataattggaataatcactgagtcattgtattagtccgttttcacgctgctggtaaagacatacccaagactgggtcatttataaagaaaaagaggtttaatgtactcagttccacatggccggggaggcctcacaatcatggtagaaggcaaaaggcacatcttacatggcggcagacaagagagaaatgaaagccaagggaaaggggaaaccctgtataaaatcatcagatctcttgagacttattcactatcacaagaatggggaaaactgtccccatgattcaattatctcccactgggtccctcccacaacatgtgggaattataggagctacaatttaagatgacgttgggtgggaacacagccaaaccatatcagttatctttctaaagtgagacaaaaagtcagaattctgtaacacattttttcccaagcgtttccaaaaaaggttggctttaatggagtattagtttgctaggcctgccatggcaaagcactatgaactaggtggctaacaacagaaatttattttctatcagtgttggagtccagaagtctgaaattaagagtcagcaggattctgctgtctctgagccctatgggaatatcctttctggctcttctagtttgtgatgtttgccagcagcgttctctgttccttggcctgtaaatgacaatcttctcgttgtatcttcacatcgtctttcctctgtgcctgtgcctgtttgtttctgtgtctacctttcccctgttcataagaacaccagtcatattggatcagggctcaacctaatgacctcatttctttccttttctttctttctttctttctttctttctttctttctttctttctttctttctttcttttcttttcttttcttttccttctttttttctttctttctctctctctttctttcttctttttctctctctttctttctttccttccttccccccttcctgcctccctccctcccttccttccttctttcttttaaaaatatttttcttttttttcccttccttcctccctcccttccccccttctccttccccttcctccctttcccccttcctccctccttctctccctccctccctccttccctccctcagggtcttgttctgtcatctaggctggagtacagtggcatgatcatggctcactgcagcctcagcctccctggcctaagcaatcctctcacctcagcctcttgagtagctgggaccatgggtgtttgccaccatgcctggctaagtttaaaaaaaaaaatcgtagagatagggtctcactatgttgcccaggctggctttgaactcctgagctcaagggatcctcctatctcagcctcccaaaggggcgagattacaggcatgagccactgtgcctggtgacctcatttgaacttgattacctctgtgaaaaccctgtttccagagaaggtcacattctgaaatactgggggaacatagttccccatcttataagatagagaatggatcaagacgagcagctccattctttgtttgtgtttaggccagtgccaagttcaagatcttgcctcagggctttcctggtacccctgggaatgtgtatcagcagcagctgtgtcactgaatgggtgtcacctggggggctgcctgttcagacattagaagctgccacatcccctgttaactccatgtgagggaggaatcccttccctccgacaatttcgcctgtgagaatcaagtcagattttgcagtgagaactgagctgagtgtagaataagttcccgaggtacttctggcaccgttgttactcccccaccgagaagcccagaatgttcccaggtgtgttcaaagattgtacgggaagggcttaggacggtgcttggctcatataaacactcagtggcaaagaggttgatgcttaagtacacaggaagtgtttaccagtacacataattgtataccagtgagctccaccattcaatttactgtctgtccggtacattgaccctgtgaggcccactctcggtgtggcactgctaacaggttttattgttgcttactcacttgaaaagtgtctcccttggctagacctttgtcctgagcactggacacacataggtgctcagcagcgtccctctctgcaatgcaaaagggataccgtgtgcctctgcatgtcagctctagtcctggcatcccaggagcatacggtgacagtggaagtgaagtgcaagccgagtcctgggaaccaatgtctgccagaattaattaaaagtaagcatctttttttccctggttagttaatccaggatgaattccctgagtagttcctgccgttagaacttgctctcttttttagttagacacagctcggtgttgcctccactttgacatcacgttcatagttcctgtgcttggccagaactgttttcagttgcaaggacatgggtgagactggtcaaggaattgactttcagggttccaagggaataattagttcagaagtctgtccccatacttgttttccagtacaatctgtgtctctgtgggtgttttcttttaaggctgtgtgctttataaactggagatagaaggagccagtttattataaaaaggataaaatataattaaacaattaaaagtatgtctttatagccgggtgtggtggctcacatctgtagtcccagctacttgggaggctgaggcaggagaatcgcttgaacctgggaggcggaggctgcagtgaactgagattgtgccactgcactccagcctgggcgagagagtgagactccatctcaaaaataaataaaaattaaaataaaaataaacataggtctttggccaagtgtagtggctcccgcctgtaatcccagcagtttgggaggcagaggcaggaagatcgcctgaagctaggagtttgagaccaacctgggcaacatagtaacctcgtctctacaaaaaatttttaaaaattagccaggcatggtggtgtgtgtctgtagtcccagctactcaggaggctgaggtgggaggatcgcttgagcccaggaggtcgaggctgcagtaagccatgatcttgccactgcactccagcctgggtgacagagcgagaccctgtctcaaaaaaaaaagaaaaaaaaatttatgaagtactggttgggttaacgtttcttcttctaaccatgagggaagtaggtgggctgttctggtgactcagtgtcctcccagactcactcatgagaggaagtattcacggactgtggtgatcttgtcttggaatttttttctttgcctcctggcctcacagccgttccttttcttttacacatccatgaaagggagactctaagatcttccttgccaaggttgttgtagggatgagcgatgatgtctctgaggcaccaggcacggtgctggcacccagaagctgcttaatgatcctggaagttatgaccattgctcatagtttttcctacgtttcagatcatccttaaataattgtcattggctgggcgctgcggctcacgcctgtaatcccagcactttgggaggccaaggtggttggatcacctgaggtagggagttcaagactagcccgaccaacatggagaaaccccatctctactaaaaatacaatattagcccggcatggtggcgcatgactgtaatcccagctactcgggaggctgaggcaggagaatagcttgaacctgggaggcagaggctgcggtgagccaagatcatgccattgcactccaacctggacaccaatagcgaaactccatctcaaataataataataataataataataacaacaataattgtcatttatcagcttcttcgagctcttaatatatatatcgccacctttcacaaaggcaaaatctgcattagaaacactgttgtctgattttggttcctctggaggaggggtagacagtctttttgtgggcagggtctgtgtctgtttacctctattccccgccccccactttggtgcccaccacagtcccttgtgtatggtggatgctccttgactatctgaggaataaaatcaattgtgaaacagtttccaaaaagggaacagtttttgtttccccgtttccttatagccttgtgagttgctatctctcttggctctattattaataacataaaagaaagagctgttttcttaacctctggtagttgcacatatatggggaaaaggcataagaaaatatgctggcaataaagacaagtcacagattgtcattttctttggtgactgaagggatatttcagtaatttataggtgaaatcttcctttttgtgacttccactgaacaacatttttactaccaaaagataagggaacaaaattttttaacaaactatttaagcttaaatatttaaacatttttattagtcaccacatattaataaaatatttttattagcacatattttattagtcaacacatgtgtacacagctctgatgatctctatgtagatgcctatataaatagctatatagatatcatcagagctgtgtatatatgtgttagagatagatgcacatacagttgccccctgtctcccaggggtctctgtgacccaaggttgggaccctcaagtgactagttatggatggcaaggggggctgcaaggccagagttggtcctggctagagatttcaagactcgagtggctgggaaggttttagaatgcaggtaaaccactagttgctccaaacaacaaaaccatcataatggaagcatccaaaagtgtgttcttcggcagcttcagagactatgcctaagcaataaagttttaatgtcttttttagctgcttaggtgaagaatgcatttgactgtaatctaacccattaatctcttatttttgctggaaaattgtacatatttaagagtagtggctcattgccagtattggtgatgagtgatatattttaaactatgcttcatacctttcagtaaatcttgggctgaaagatatgtacgttttgttttcaaaatttttcagtagtcatctatttaggtcaattttctgggcaaacaaaatatttgaagccctttagggtttgttattgagatgtaggctggccatgaaattacagggttcagtacctcattgaagtgtatatgtaactgttattagttttttgataacttttttatactcataaaagtagtacttgcttacagtagaaacttaataaaaaccataaatggaaaaataaaccattcgtaaacatcatatagagagaatgactattaacattttagcctaacatgattttaggggtttataatattctagtatatgattgtaccataatttatttaattgcttcccaattattggactggaagtttgcttctaattttttcttattatatatgatgctgtaatgagtaccttttaccagtaaatatttacctgcctctctgattacttctttgggattaatccttagaaataaatttgatgaatcaaagggcatcaaccctttgaatgcttctgatacttctgccatgttgtttcccagaaaagatataataattattccttccagtagtagagtattaaatgtctgcctctctttagaaagtattaccttttttcaatctttgacaatttgttagataaaaacttcagtttcaatattattgcatgtattcatggatatttttcttctcacacattctagattttttctatattgtttataaatgttttataagtgttattactttattgaggatagaaattattatgtaacacttgatggtaacagtaaaagtggaaaagaatgaggaaaccttcaacaaaacaagttgtcattaacaaaacgggttttgcaatgcaactttctgtgggttagctaaatctttagtgtgtcaggtagtcgaaagaaatttgctgtatagtgctgtgaaatatgctgcatccatgagccctctgctctttgcccatagggagcaaagacacaatctttttgcaagctgtcccagtgccatattgaccatcttccttttacagcaaaaagttattgcttcctttggttaaggttgggacacccctctggaggcacacttgaaaaatgaagacctttctcgttgttcttctgttatccaagtatcttggaagaacacctctatagcaggtagacaaggcagggtgtcattgcaatctggctgcagactgaatgtaatcccccttgacattttgccccttggaggcaactcctgccctcccctctccccttacgaccctgcccccttaaaatatgtggagctcagcaaagactatttattctgataaaaatgagcaaataataggtgtgaaagaacatggaacacttcagtgaatcaaatggagaggattaagcattaccccaataatgattggtcaggacgactgtccctgtggagtgtgtcccagaagggttgagcaatggagcaaacccagaaaatctcattctcaactctccctgacagatgacctcgtctgcgctgtcttttgcttcatggtgatgaaggtggaacaagacccttgaataagatttccatctctgaattctttaaacccatttgagatcagtgcaggcctgcagtctctctattagaactggagcagaggcccagaagagagaactgaattttcagcactggattctatgttgagaatgaaagagacaataattgaaaagcttttctcttggaaattttgcaaaatccgagtggatttttgaccaggatttcttggtgacctctcctgagagagcaggtgcctgaggatttcctgctgagtatcttggcatctgtcagactccttatgacttcattttagttcagggagtctgtttcctagccattgatttcatgcacaattcctggcatgtctcatatctctaaggtgatgtcacccttgtatttttttttcagatgtaatcttttatgtgacagtgaggtgtcttacttgtgagtgaacagctagaacctcccaagtggtttttcttttggattttgtttactcagtgaaaaatactgaggaacctgagatccttcagggtgcattttggtgtctgcccaaccttgacgtggatttggaggccaggctcaatgctcgaacttcttgttggagtggcactaaatcattaggatccctgaggacagacagttcaggccatcattatttggtaggcccttgcacacttacacacaaatgcatcattatgaacatggagcagaagattctagggccccgtgtgtaatggcacaatttgtcaagaggcctgagacctggagttggcatggattccctctcctcctgacccacctacctgctacattcagttggccaccctgttcttttgagtccacctttggatgagtagtcagtcctttctgatttttgccacctctgcattcagagctttcttattctttggcgcggaggccttccgttgggtcccactgcctgctgtcttatctccttctaatgaatatgatcatgatttttctgtatttagacaactccacgatgaggaggatgatggcggcagctaacatttatgtatgtatgtatgtatttagagacagattctctgtcacccaggtgcagtggtgcaatcttggctcactgcaacctccccctcctggattcaagtgattctcatgcctcagctccccgagtagctgggactacagatgcacaccaccacacccagctaatttttgtatttttagtagagacgagattttaccatgttgtccaggctggtccggaattcctgacctcaagtgatctgcccaccccggccttccaaagtgctgagattacaggcgcctgcctccacacccagccagcagctaacatttattaagtgctcactatactcctgccaagcactattataatttgtcttctaacaggctttttataagggaagtgctactattatacccattacatagatggtaaaactgaggcacagagaggctatgtaagtttcccaaagtcatgtactaattgatgaagacccagggtttgagctctgcaggaatggccgactccttgtggtttgagcctgggctccctctccatctgtcttttctccctgagccctcctgactgcagccatgccagactttttaatgttctgaaccccagctccagcctatcactggagctctgcctgtgatctttccacctcatgcctcccggttctatgtgtgccttcagactccatctggcagtggtatctggatggaccagtgcatagaaatcacatgagacactcaataaatgtagactcctagtgattctgactagcaggtctggggtggggccaggtacccagatttgcacgggaagtcagggaccactgctgctgactgcttttttcctgggtgcttggcacactctgtcacaatcatgttttcatttctctatgttccatttcaactggatagggacagtgtcttttgtttctggaacctgtctcttttcttggcatatagtaggcactcaggaaatagaaggttgcttgaatcctagtaccagtttactatctccttggaaagactgaaaggtagaatgtgatgtctaagcagcttcactaagcagagaaaacaaaaagtttgcaaaatagaatttgccttttaatctacatgttcttgcgtagcattgagcttcctagagagtcatattcatgctagccctgagttgtatcagcagcagccactagaacggtaacttgatgccaagagtgaattctgatgagcttcattgtgagtaagagtcccagtttgatcatctctacccagatcccgtgggacctccacactgtatgaataatgaggaggcgtggaatacgtagcatgctgcagttggccagcacccagtgtgtactgtgaggtaatcagtgtcaaatcagtcattgtagcaggagttgggagtcaaaaggagcaacagagaacctcacacgtctcctaagagaggaagcaaagaacagttaccttggctgtcatttatggggcatttgtattgtatgtttggaatggtgctgggtactagtattaatacatgattttctctggtctttgcaaaaactgcctgagttaggaattgtcattcccatttcattcatgagcaggctgaagttaagagtggttaagtaccagctgaaagggaggaggagcctgagagcaatctgggcacccgttctccccctcttcttatttatgaatgaatgaatgagacagggtctcactctgtccgggtctcactctgtcgcccatcctggagtgcagtggcacaatctcggttcgctgcagcctccacctcccaggctcaagcagtcctcccacctcaacctctgtggtggctgtgactacaggtgcatgccaccacacgcagctacattttttttgtatttttttgtagagatggggtttcgccatgttgcccaggctggtcttgaacccccgggctcaagcgatctgcctgcctcagcctcccaaatggttgggactacaggcgtgagccactgcgcctaaccctctcctcccctcgagcttacatcctactgtcctgtagccagctccaagatgttggcctttggttctctcttcaggctgaactctctttcagggagtttcctaatcgatcttccatagagttgatcataccttagtacctacctggatgagcactcaagatgttacatattcccacctgacttctttattactgctggaagatatggtgtcccacacctaagtatcccacccacagtccccagctgcatgtgtcgattattgtgagctattcaagggatacagactgaggtaaatgaaccaccagtggaagaatgtggatgttctattacaggaaatgcttagctctttattgcagttatataatagccggcaatcatgatagctgaggggcataaaaatgagagcaacagagtttatggtattctttataactgtggattctgtatgtgcgtgtgtgtgcacgtgtgttctgcatgcatctccacggcacattatctggaggtaacatgatcatcaggccttgagctcttttataagcaatagattgtggctggaaattgaaaatttagtttctgtagctagaaaatactcttttcaaatgccatctagaacagtagttctctgagtgtggttcctggatcaggagccttggtatcactgggaatgtgttaggaatgcagattcttgggttctaccccggattgaattcagatttgggagcggggcccagttatctgtgttttaatcaccccctcccccaggtgaatctgatatgctaaagcctgagcctcactcccctggaaagtgacgcctgattcatctgccagcccatgggcacccattaggaaggtgcttatgggagctttgacctgggctaggtgccggctcttgatccatctttttctaaggctgagggtgtccatagaaggagaagtaggtgcatccgcttagatgttatttaaccaaataaaggtttacagcttacagaaaagaggcaagattaactaataccttccaaaccataatgtaaaaaaaaaataaaaaatatttactcataatggagtataactgaacaaatcatgttgctaatttttttaggatatgttttgtagcttccattcagatacatcttatgggtaataaatacacacgtgaacacacatatgtgtactaacaatatttttcagacttttgattttttagatattgagtatagccttgttactaccaaacttttatcatacttccttgtgaaaggatttcatggcatatttattatttgaaatatcaaatagaaatcagtacagtctcagcattttaagatacttgatgtaatctttggaaatatcttagacattgcaaaataagggttaatagtcatagtatagccactaacgggcagttctgaaattacataaagttaatctgatgaactgatagcaatcagtttttggctatacataactagataagtgagaatttagagattgaatacatgagagccctttttatgattttcaggatctcaagtatgaagcaaaataaattcttctataccctaaattcttgcaaagtgatattttgattagatttgagctaccccagggctagcaatacttgaaagtgtgactagacttaacctcttagtagatagtccgcagtaatcctttgaaatatacatcttgctaaaagttcctttcccaaggaaataatgattaaagataatgtgatgtgtacaaggaattctgggacttgtagtcgagaaacctgaactttaatctagactactcaaatttataactttaggcaaatctctcttgactttctaggctttagttttctagggttttgttttgatttgtttttttatgtttttgtttttgtcttttttttggggggagggtgttgagacagagtcttgctctgtagcccaggctggagtgcagtagtgtgatcttggctcaccgcaacctctgtctctcaggttcaagcgattcttctgcctcagcctcctgagtagctgggattacaggcacctgccaccatgcccagctgatttttgtatttttagtagagacagggtttcaccaggttggccaggctggtcttgaactcctgacctcaggtgatccacctgcctctgcctctgaaagtgctgggattacaggtgtgagccacctcgcccagccttgatttggtttttaatctgtaaaatggtaggtgttgggtcacatgaacaatggctcttttacctccactaattacctagacgctagaaataagaatatggataagacctaaaccaaattttctagctaaattttgtaaagtctgaacaaaatctgtgtgcgttttaatctttcttgtaatcttttcagactctgtctttaaaattatatatatttttagcttctaagtaaacattattggcactggttttgataggaactttactccaagtgtattgacttagtagatatgttaaaaaggttattgcttagtttgtggaaataatacaagctgagactttaactgatatttgtattttcatttaggttccactgttttctcttttgaatgaaaagtataatcctattaaatctaaaatattttcttacagtgatccgtatgtgaaactttcattgtacgtagcggatgagaatagagaacttgctttggtccagacaaaaacaattaaaaaggtaggtgtcgatctttaaccaaatgtcatttaagtcataatttaatccaattatgcacagtcatgtgctgcttaacacctttttggtcaaggatggactacttacacagtgatagtcccgtgagattataatggagctgccatatacaagtgcatcactttttctcttttttttttttttttttttttttgagatggagtctcactctgtcgcccaggctggagtgcaatggcatgttctcagctcactgcaccctccgcctcctgggttcaagtgattctcctgcctcagcctcctgaatagcagggattacaggcacctgtcaccatgcctggctatttttttttttttttttttttttgtatttttagtagagacagggtttcaccatgttggccagactggccttgaactcctgacctcaggtgatccacctgtcgtggactcccaaagtgctgggattacaggtgtgagccaccgtgcccagcccactttttgtcttatatactgtattttcattttaagtgtctttcagtattaaatctagaagttttccaagacttttcagtactaacccaagatagtgattcaggtttttacttaaatgcctacaaaaacagtatcctgaaaatgtcataagttgtaacattttttcttgcacagaatacagcaaaaacaaggatttgtttttgtctttgtatgtttcacaaagaaacttaaagtaatttaaaatacatttaatgaaatggagctgtttgtggaattggtaggcacaccaggaatagtttaacttgaaacaactatttctaaaggaagcaaaatacttggttagctacatggaaatagagaaaatatattaataataaagctatacatgtatgtatatatcttattttcctaatttttatgtacatgatttcattaaaaatttgtttccataagtatgtcttttagttatttatttatttagtttgagatggagtgtcactctgtccacccaagctggagtgcagtggcataatctcagctcaccgcaacctttgcctcctgggttcaagtgattctcctgcctcagcttcctgagtagctgagattacaagtgtgcaccactatgcccagctaattattgtatttttagtagacgtgggattttgccatgttgaccaggctggtctggaactgctgacctcaggtgatccacccgccttagcctcccaaagtgctgggaatacagatgtgagccactgtgcctagccaataagtatgtcttaatttgcctatctccatgtatttatagacatatgtaatatatatatatgtaaatattttttaccctatgtttggaggctttattgaagatgcatgttctctattaaaaatacttggctgcatgtggtggctcatggctgtaattctagcactttggaggccgaggctggcagatcaattgagcccgggagattgaggttgcagtgagccataatgatgccactgcactccagcctgggtgacagaatgagaacctgtctcaaaaaaaacccaaaaaacaaaacaaacccctttcatctgtgctttagtatcatttatgggttactatgatttttttccttacctcctttagaggcgggtgcttagatagtctaacactttgctgaacattttctggacagcatgagtgctttaaaaaattgtaactgtcttgctgccatgcaggcacccaggatgcagccaggtccttttgtgtaaggaaccgtaactgcagcgtgtcctccacttggcattgggactggcattaaaaatctgttttgcaaacaggagccagtcttttgattagcagggaggatgcctgcgagggacggaggccattgttccctgtgttaggcgttgttgctggttcagtttctaggcgagtgggggctgtctagaaggctcaccaggaaggcagctgggaaacttggttgcctgctggatgtggagccaggaccaaagccggcgactggggctattgcaatggatttccttccaaagggaggtcctccttctccctccctttccacggtcgagggagtagctctgtagctgggtttgccctccttctcctgctgcccgcctcctggttcgtatgcctctgctgcgttcgggtgcgagaactgccgtcatcctcctctccttgccgtgttgtgactggttcttcgttcgttttgtgctctcctgtcttgttgctttcctcgcctgtcatttcccatgtgcatttccgtgaagctgccctccgggactgcagccagaggcaggccaggcctgctgctccactcccctcccctcgttcattaccatccttggcttcattcacatgggagaaaagtatgaaccccattatttaggattgaattcactgtggagttgtgggtggggaaagtgctgaatttttgaaaacgccggttcagtgttgtgtgagctctgtgtttcctatttttatgttgcactctgttgatttttttcatctccctgaactgatctattaaaggaaatagattgataaatatcattttgactaaaaatatctatcgctgttggtgaagtgatggtttttttttacatacaatttttaagagctgtctttaagaggcttatgcatgtgcagatgcatgaacacacatgtacagtcttccttcctagaacatgcttcctcttagttttgggggatatctggcagtcctttcttccatgctgaggacaaaggtatccttgccatctccttgtgagatgtacatttaagtagactgatagaaagatgaacagatggatgaatggagaggaagactgaaggataagtagacaagtattttttaacctggttatttttggagaaaaaaataattcacttttggcttacatttggtctttttttttcttgttataaaatctgatcctcagtatagctctctataaaatgttaagatttcaatatttatataaacaatgaacacattcaactttcccccacctgcttcgttactctgcaaaacagatttgtagcagggagagggaagtcaacaaagttcatttccttcttggtagaataatcatatcaatgctaatttcttgaagaaattttttatattttcacgatgactctttccaggcctttgatgtttttccttctggtgatagaagcagtttaaggtttcatacctatgaagcatctgtttcataaatacattccctccccctccagtttggtttgtacgctagtctcaaataatcgactaaatgcttctcttagctttttttaatcaaaaaaatgtttaagcaaatatgtagactgtattgtactagtaactgctaatgtttgaaagactaaaagatactacaagataatttctcttccagacactgaacccaaaatggaatgaagaattttatttcagggtaagtttttcattgtttggtaataattgttattgatacgtctaggtcgattatcacagtcaattcatcttgaggaaaagctcttaaatttttaatgagaaattccttttaggatgaaaaataggtagcctcctaatgtgtcccaaattttgaaagactagaagtagtggtcacagaatccggacttgtttcattggggagtgttttggagaagtcaaaagaaaattatccaaacaccatgtttcatcttttgaattcaaacctttctttaagaaataagataaaatatcatttatgagaatggtttaattctatgagacgggttatgaaatattttagagagagtaaaacagtagaggcaacatgattaaaaagaaacataaaaattaccagttatattctagttagggaggaaaattttggtaactgaaacacttgagtgcatatatatgtgtataatataaaattacttctggaatctaaatacaacagaattaggtaagatttcctcaaccttttatatttaatatttagaatagctatatgtcgaaatgactgaaatatgtgaattagcagagatttctgcttattgagcatttgtggttgttgctgtgttttactactgacattttggaactattagactgcttagctatttaattgaaagaaaggactttctcttcaaaacgaaggtatcttaattgtatagctgtgatattaaaaactgcttacctccagaaataatccaggtcttctgattagtgcagatttccaaaggccagtattgccatgaggcccattataattggtcctgatttcttcctctcaatcgcaatagtattttttgtgctccaaacttgggctactacatacagcatctgctttccattatgctcagagctgaaatatggcactgatactttcatacttggtgaaatcctatgtacagcctccaccagatgtatttgaaattaccctgtggaggactgaaaagctaataggagctgatagatgctgttggcctttagttaactctgaaatatagctttccacttgtgaacctccaaagtgtttagactcctttcagtggaacactggcacagttacataaatgttagtacatcccatacttttttcagctaatcttggcagtaggcacatttaagttctatttttgttagtttttctgaaggttttttttgtttgtttgttttgttttgttttgttttttgagatggagtctcactctgtcaccaggctggagtgcagtggcacaatcttagctcactgcaacctctgcctcccaggttcaagtgattctcctgcctcaacctcctgagtagctgggactataggcccgtaccaccacgcctggctaatttttgtatttttagtagagatgaggtttcaccatgttggccaggctggtctcactctcctgacctcgtgatctgcccgccttggcctcccaaagttctgggattacaggttcttaaggtctttatatttattcattttacaaatctttattgagtgcctattatgtgccagctcctgcctgtagcctgtggttgcattggtaagcagtgtgacccttcatagagcttctaaacagatagcaaaccccatctgcttgttctgtcgctaggctgcaggcagaccacggaccagaagcacaagctgagctctctgtgcttgtatggtcaagtgttatttcatgcattccccaccatgaagcagccagggcctaggtcacctctctgctttaccatttagagcctttgtgaccctggaaaggccacctgaggactctcaatctccctgggatccttatctctcacataggagagagaatccttacctgcaagggttgtttcaaggatttgcatgcgatgatgtaaatgagaacatgtagctctatgtcacacatgtggttggtgcttagtaaatgatacctgagtttggaagatgatatgggccattttggtgaggttttggtaaggaaaaggaagcaaaaagatatggaaagcccagtagctctgtcattgcctcacagttccaggtctctctcatggttcacagtctaggctctggagacaggcagcatagacctagtgcaggtcctggttgccctacacattagctgtgggctcttgggcaagttacttcactgaacctcagggtctcggctcctcatttataaaattgcgtgatagttatacatcataggattgctgtgaagattaaaggagatcatgggttgttgatatttaataacaagacagtgcctaaaaagtaagtgcacaggctgggcacagtggctcatgcctgtaatcccagcactttgagaggccaaggcatgcagatagcttgagcccaggagttcaaaaccagcctggggaacatggtgaaacctcatctctacaaaaaaatacaaaaattagccaggcatggtagtccaagctactcaggagagtgaggcaggaggatcaattgagcctgggaggttgaggctgcagtgagccatgatcatgccactgcagtccagcctgggcaacagaacaagaccgtctgtctctgtctgtctgtctgtgtgtttgtgtgtatgtgtgtgtgtgtgtctctctctacacacacacacacacagatacattcttaagctattacaatcttcttcattatttttatcattactattactgctatcaggactaagaaatatcctcaggcatagacattttttgatctacagtcatgagaatgccttgtacagaggttaggaacccgtcaaagctatttacaactatcctttcttattttagaaaaacagctaagagccttctcttcttttgctatgcctaaatttggggcagaataatatagaaatcagtaataggaaatttgatttagtacacatagaattcccagaacagcaggataattgttcatattatacaattgagttgggcgcattgtaaagcagtatgttattctttctgttccttacgtcgctgttcaaatgattcctgctcgtttaaaaaatactatttatgttccttataggtaaacccatctaatcacagactcctatttgaagtatttgacgaaaatagactggtaagtggatgcctgtatttgaattttgcttcatttttttattaactggattttcagagcagcgtctttaaaactctgtgtttatgttgtacttaggacagtatatgtgcccaaaaagaagactgtttttgtcccactacgagtttgatgttcaaaatcctaacaaatagttttatgttgctaggataaaaaatgtatttgtatgtgtgtgtatttttattgcagttaatgttaacgaaagccactggtgatagtaccagcccatatgctcatgctctaatgttgggaatacagaacggtaggcagatctctaaagaggccatcaggaatgtaaacaaactttgctcggtttttaaatgaaagccagaccatagtactgggatgcattcagtagcaaatctatggtaattctctcagggaaaataacaatctaattaacaacgtatagcaaaaagtgaatctacatttagcaggtaaagtcaagccgtattttaaaagtggttgccttcttaagagagaaccttagaaagtacctttaaagaaacaaagatatgcctgaggcatataacagatacaaactaacattttatatatagattgatgtatatataatatgtttatgaagatcgacacatacataactgaaataattatgatttcattttattgtttttaattttttttagagagagggtctccctctgtcacccaggttggagtgcagtggtgcagtcgtagctcactgtaacctcaaacccttgggctcaagcaggactccaggatagctaggactacaggcatgagccaccatgcctggccagatttcattttagaaatggaatttttgaagcacattttgctttcttaactatctaaaacgtgtacatcaagtagctgtgaaccaggtgttccaactatgaaaatgaacactatcatgttaagtccttaaggtaccttcagaagtgacactataattcagtgcagtcattctcaaatttaccctctctgaaacttgtatggtatgttgactggttaaaaggtgttcttaagaatcctttctgcagtattcaattgaaactccagatttttaatagctggacgttaatagaatatttgaattggaggagccttatacaataactcatttaactcctgttgttgtcgatgagaagaaccaggtctagagcctttacataaacacatcagtcagtggaggtgccagggtctgacctgctggcctcctaagtcccagcccagtgatagtttgggaatgtattgaatctcatatgattagtattattctccaaaagagaaaactaacagattttggcctaccatcctagtatcttttccattaaagtatgggatgttgggtgatgaacagtcgtacagtgtaactaaaccacttttgttgtatgcatcaaagtactttcttgtgaaattggatgagagattctgctgagggtgcagttcttgtctctccatctctcatccagtgaggaccaagtgagttaagcagtattgagtagtataacagtacgttcctggagacatgggtgtgtctgtagactaatccttattctccaattattgagtataatatctcttgtttaacatgaggaaagggtcaaatttgaggaaaaatggcctcttgtttgatgtgttttagttcattattctcttctattaagagaaattcactgttaaaaaattgtttcccatttccgtatctgaaataatgactgtagttgaggtgatcttgccctgggtctgaaatcatacttccaaaccaaaaaggactttgaatacaaaacttttaagaaatcttgtatgaatacaagctatatctgaaaaattgtgttttataatattgatgcctagttttgccccaggccatctgcagtgtggttactatgcaaagaatgctggtgttgctgtttttttttttttctttgttggctattaacccagcggagacaatatgtggctatggtagtacttggaagttctagcattacacagactagcttccatttctctcatagaggtcatttttggcatttaaaacacatacttttagaaaacagatttggatgtatgtaaacacagggttaatccaccacactctggatgctagagctgttgacaaagtcatgctttgcagattttaaaataaactttttgttactcttacagcttggtattttcccctcctattttttttacctcctctaaataaacctctttgttaaataattgatgtttctggatcatagaaaatagtaagtttaaaatacagaatatttccaagctaactacaaatctgatgacagttttttgagtgtgcacttttccttttatttcttaggtcctttttggtcctttgcaaacatagtaagattccatatttgtgtcccaactgtggtaatattgctgacttcttactggaaaacagtcagctctaggtagcatttcttctgtgtggtatttaagttaaattattaccaaaaaaaaaaaaaaaagcccacatgcactcccttcttcaattttccttttgttttttgttgtttgtttgttttttggttgatgttttctttcctacctgacatatggaagacaatgttttctccagctgggttcattttctctttgaaaaggagacactttggtgtctgccagtcatatgtgagctacacacacgtatacaccttttaaatgaaaaatgctgtgatagcaggagggctctgcttggctaactggttgtgtagcaagtcgggccccctcccctccacttagctattttgttacttgtagatcctgctctaattatttagcattaaacggacactaactctgtagggtgtgtaatcgtatttatagtactgttttattagtttgcattccatcctggtagtgtagtgatgtcataaataacagaaacatggtatccgatgcttgggaaggggtttacccggtggccaagccatattttacttgtcattattccgtgtggcggaaggtgggaaaataccgtgtgtgctgttaaacatgccaggtccctgcactggttagacagagtctcagtgctgtgctccgttgggaaagaagtgccctgcgaatgtgatgtggtttagatttatagcagcgtggcttgcagtgtgtttgctgccttagtcagctgtgagagcgccctgctggggccactcctttctgatggaaaagcagcagctgggaaggtgctgtttcaggctcttgctgtttaaaaaaaaaaaaaaagagcgagtaggggaaaactcctctaagtccagaagctggcattggagggggagagcgcggtcatgtggttctggccaccctaccctctgtcacagtgtggatgagagctttttgctcttatccaatcatgcctggaatgccgcttgccacttgggttatttctgctatctgtcgctcccggtgccgcagtgctaacagtttggcagatgggacactttttcttggaatttgtgtctttggtttgtgacttctggcagtgtcgggcctgttgttgccgcttgccctagccctcctggcccccctggtcaccatggcccatcggcttcggtttcattttggctctggtcgcagcaacacagcccccgaatcagacatcctagaccaggagagagaagacgacttcttcatggcattccacaccctaccgcggagaagcagcccgcaccccttcgcccagaacggaggggaggacggcggcggaggcctgcagggaggcgtgggtgcgcttaagcggagctcgtccatgttcatcccgcagctcttgaccagcatcgacgcccgccccacgtgcagctcctccgtgcagatctccctgcagcgcaaggccacggacggggccacggacgggtgcgggccgcccgagggcgccgacgatgggcctccatgcgcaacgcccgaccccagggaccaggcctccgccactgccaccacgagggcctcgccccagagtggctcccgggagccctcgccgagggacacccccgggagctcccctccgagggcagcccgggacccagggctccaggtcaacggcacgtgcggccgccgcgtgcggtgctccggccccgtggactgcgcggaggaggctgccccgggcctgcgcatccagcaccgcgcctccagcgccgacgtgcgccaggtgaggctgctgcccctgggccccgatggccagggcggcccggccgcggcagagcccaggcgctggtccctgcagcacgttccagatgcttctggaagctctgggaagcggtgttttgtcttccagttgcagcagccccaacaaggcgcttcggggccaggcagcgacctcaactttggcttcacgggcacaaagggggacaggttggtgaggtatcctcgcattcggctggagaggagcacctcgtaccccacgcagccccgaagcgagcgagggagccccacggaagatcggggagccctggaggcatcgcctcgagctggcaggatggctcctgaaatccgcaggacgaactccgcggagaggactccgcagggccaggggtgcacatttaagatcaggcaggatcagaacgcggggcagcagcattttagaattcttgtaacccgggggccggaagaagctccccagaatcccgaggagaaaagcgccaaaagccctgtttccacgggagctgacaccacggtaagttcacagcgtgtttacatgtgtttactgatttcaacttcgatgcttactctgcggcgtaaccaaaataaaacctcaccctctgttccgggagtttccctgcttcaggccagtggatctgaatgtttggccgagttctggcacgatgatttgtggtccagtgtttggtgcgcaaaacaccatttctgcaaatgtcttctgtaggtcctcaaagtcaaagaactttgtctgtttgggaaatccaagcagaataccttccccctgcttttatttttctgaatagaagaatttcgaataaaatttgttactttaatctgccaaaaaacaagtcagtgccccaacgtgctgatgttggaattgcatttaaaaagctgcttgcaagtatagcctgtgacaatactttaaaaataatcagttctcggaaaggggaggatattgcaaaggacctcagtttcgtctcttaatagttaaaataggtgaacgtaaagtttagtggaatttgattatctgtcatggcctgtttgctgcaggaggtcaggtcagtcgttgttatataatttgctttgttttttgtcccattaagtaatactgaacgagagtagtgtcgcttgtgggatagtgacattactatcccacaagtgacactgctaagatactaacagatgcgtttttaaagcacattgggttatggcccaaggctaggggaaactgatggggactcgttaatggtcagatggcgtggcgtgcaatttaacactgcacacttgagtgtccaagccgaggatgctgtatatagaatagtaagtaccctgtctccagctgtggagaaatagacgccttagaacagattctggccttcctgtttctctgttcctgatcgctccctttcagtgaaatggagtacagagagacagctgcacgctccatcgaccaggcatatgatgactctgcagctttcgtggtttagagtggaatgaaaagtttaatcagtttggtttcttttactagtaatcactagccagtgagtgctttctcctaaagaacaagctccttatattttgaattggatattttttctcctgaatttcatgtgactgccagtttgaggatatgattagtaaatgtctaggggacttttctttggatttcacttatgaattgtgattttgaaaagtgagcgtctgagtattactctagaattgtattgtcttttattgctttgtgttcagaaataagtttcgtctttcaagtaaactttatcactcctccatcattggttttcatcattttgaagatacaatcagatgcttaatgaaaatttatttttcttcttctctttccttccatgtatctcctttctttcattatctcaaactcttctattgggaaatggctaagtgctttgtcttggtctgaacctataccatgtattacacaatggtacaaattttgacagtgttttgatattatagtagcctttaacgcccacccccaacaaattaccatcatgacagttgtaggctttgttcggcaacacaattccatgctgaacttggaccacttaccgcatgaagattgacaaaaatatatttcctaaagtttgataactattcaattatattaccaaaaactgaaatcactttgcagttctgatgtggaagacaaagggattcatacaattaaactcaaaaaagttcaaactcatttggtttgaactttcaaatgtaattagaaaacaaatcgaataaactaaaacttatgtgtaccttgcttaaaagggctattctaacttgcaaggcctatgtagtgaaaaacaagtttctacacatttggagaatataaattctggaataaagagcttttcttggagagtaagttccaactagtgaacagtagtttgcattttcatatgtatgtatttttgtacacatacataaattagtacgtggttagtaagctggttttcttttaagcaaaacgatttttctttaaaaaacaaaaccaaaagtggtcacataacaaaaccgcctgctccattcagcaactttgtatgcatttcatatggacaggggtgttaagtttaggcagcagctgccaccgccttacttatcttgaaggaaaacattcacttgggcgtctacagtctggctgctaccaagcttttttggcgtttcaaatatccactgctttggtctaaaggacattacattattaagtttacatgaaaaattagctagaatctgttgcagtttggtggtggaatgatacggaaagtcttcctagatttgggaataccgctcgggattcatttgacaacgtgctcatatttcataagctatactttagaccttattacaagattaagttgttgagtacttttatctgtgcctcccaaacatcctgccatgactaaatctaaaatgtaacatgactccaaaaaatgttaaccaactaaattattagaaaaaatacaggggaaacccttgtgatgataagttttccacctggtttatcactgtcagtagacaagaattcattcgtatagtcatcaattataatcagttaaaaattttcagaattgttagaatttaccaattcagtctgtggcagtcattagtagtcatttagtgagtaatttagttattttcttataaattagcttttgggttattgggttctgagcctcttaactgcattagagttattctgaggaagttggaccaccatttaccagcatttgtgccccctttgtatgccattttgtgcataataactgtgaaactctgcattttacaagcttgaggagccagttttctaatctcattggtgttatgaagtactcaaggtctactgtgtatataacattacacccgttacttggaaagtttcagggactatctcagtgtcttgctgacacagtttgtaatgtaaacggagggaggagggcccacccggacaaaagcagtaattctaacacctactgcatatgctattggagaagagagcgttctttcagctcaagctctctggactttcctctgtgtcctctcagtggacatgtacttcacaggagtagtgtagtaatctcttgtgattaaaaattacttttattgaacaacaaaggaatatccaaattcttttcatttggggaaactttgagtctcttttacagaagatgtttttaatatacggccattttttgacattaatattagtcgatgtctgttttttaccctaaaaataactcgagtatccaatgtattaaccacccctttattttaaaacataacaacacaggaggcgaaggtgggaggattgcttgagcccagtagtttgagattactgtttctaccactgctctacagcctgggcagcagaacgagactttgtctcaaaaaaataaaaataaaacttaatattgtaatggagaagaaaaacaagtagcattcttttcattgacctggtttctgactggattcaatcaactttctttcttctctcatgtatagtaatgctctctcttaatgtggtcttagaataaaccaatatatatcttcaaatgtcacctgttttcagggatgttttgaaaagttggataggcagtgcacaaggttgacaccgatatgtttgtaaacagaaactgtacatggcttgcagcatagctcatgtttctgtagcacttcacaatttgaagaatgctttgtttatttcacttaatatgtatggctgtcccattgtggaggcattatctcacttgaccctcccatgtgaaatggtgttatttcactgtttcagatgaaaggatgtgataccgttgttaggtgtaataacattatgtgtatatcatagtgtatactatgataccactttgtgcacctataatgggaatgtgtatttatgtgtgtgtgtatatttgcacaattaaaaagtatatgttaagccaaaaagcagtttaatgcttcctgtgatgtgacagtttttttgaaaagtttagaggtggtaacttcatttggtgtcttgcagcactggcctgaaggtgagagaaggcttctttggggatccaaagagccgtcctctgcagttcactagcttttggtcctggagtacttagactccctctctaagcctattcctcatcagtaaatttgaggataaaaatgtccagctcgtaggttcatagttaggtttaaatgaaagtgtccatggaagtacctgattcgtgaaccaggtatctgtaatatacaagtctttcccctagcaggttaattaggttaattgtgaacaaccattttttgatcagtatggcatttaacacaaggacaacatgcatttatggcatacctggaaatgtttaataaatagctttgatgctctttctgttgtcatctcatctttcctaagtatttgtccctaacaccaaatacagtcttggaaaagaattgcttcctgaactatgcattatagaaaaggactcgtaagtatatttactgtgttgattttgaagccttataacattttggcttgcatttctagcatattttttaccatgtcattttgctgtaatatttccagtggttgagtctactgttactttggtatagactgaggcttttgagaaacaatatagtgttatatctacaaaatttccacattgtatgactttaaaatgagggagatatttgggaatatgtcttattttaagatactgtcttttagagagttttcataaatggtgcagctgcttctcttggctaagcctggtggcagaattcctagtcattgaaataaatctctaattttataatacatactgataagaaacttgctatcttttcataaaagttcacagtaccagaataaatttactttatgtaaaaactaccttaaaatgtaataaatgttggatagttgaatggtttctggatagttgatgaatatttctgtatagttgaggcgaatctaaatggtaatgctacttgtgcaactgtcaatgatctagcacattttttaataaaaataattacctgcatattactgtgggcgatacaggttagctatcctaaatacgtttttacctttttaactcttaattatattaagccatttgcaagaatgggaaaaagcaggaaattcataggtggtgttgaaattgctgattctacacaaaggtaccagaatgtctacatttcctctgtaaatgtcaaaggaaactttggaaacccacctcagagttggctggtgattattcggacaggttatcatcctgtctgcaaccttctagttctcttagttcataccaagcagcatgatattccatgtcctgcacaaaggagagcaccaaaacagccttcacctgctgcgtatgccccactctgaataaaaaattaagaaggccaaaggacggaatgtgttaaatattagcaaaagcaggtattgcagaatgtctatacatttctgggcaggtggagattattgaaagatttttagaaataatcttcgttcaccacattccagtgccaggccctggacttctgtctctatttgtgataaaatgtttttaagaaatgctggctgggcacggaggctcatgtctgtaatcccagcacttccagaggctgaggcaggtagatcccttgagcccaggacttcgagaccagcctgagcaacatggcgaagcctcatctctacaaaaaatacaaaagctagccaggcgtggtggcctctgtctgtagtcccagcttcttgagaggctgaggtgggaggatctcttgaacccgggaggcggaggttgcagtgagctgagatcgtgccactgcactccagcctgggcgacagagtgaaactctgtctcaggaaaaaaaaaaaaaaaaggaaaagaaataatcttctctcagtgagcatgttgaatgcataatgttctcactggagttctcctttggaatctcttgattattctgctgtggcttccttgggccaactaggatacagaggagaataaatgagtaactcagtgagacaggtggcctgatgtgagtgggcctgaaagttagcccctgatgtcctggctggtttcatgccatgtcctaaacgggcactttcctggtctctaggcatcaccatgttttgacaggaagcttagtttctttcaggatggaggatggaatcaattgtatttcaagaagcctgttttttatgccctgacaattttagaactgtggactgttctgacacttttgagtacagtgattaaatctctgtgaagggacaggtcatgaaatcaaataaaaggacggatcataattgagctggaagggggccctcctatctctgatttgactcgttgctacactttagtattcggaaactttgtattggttcccttaagtgcctgcacaacctccctatttctggaaaccattcagtgtttgttttaatgttaagcattatgccacgtatccagtaagcagagcagagtaaattcctccaggtagcaagagactggaatttcccccaggcagatcagcttttcacaggttcctagagtttacacagccttcttttgtgacttaatttttgtagatcacagtgagtcaagtgacttttacttccctgtataataactttgaggagcctacttgcaacccacatcatcactcattatcttgcttacttctttcttgggggttagatgggctggggttgttattaagcatgttaaatactttgaaattcaaatcgtttctgatagatttagtttctctttcttctattggtcattcgagagctggtagacttttaaaatacatttaatgactcacacatgtcataactcatccatttccttgacattttcaagcgtgataataaatcctacttcttaggcttttttttttttttttttctctctctcatgttcttttcaaatgcatggctaggtagttacctcatgaaggaaaacaactgttttggtccagattttaaaaattgagttgaatagaaaaggtggggtggaaccagcaatactgaaatgtaataatgtatattaagctccaaccaaacaatccagcacttcttcaaatccaggaggtcttctggctaggagttacattgcagaactaacatggactcttaaactttgtaaggaattagtcacagttgaacactggaaactatcagcatacctctgggcttcttttatatggtcttcctcatgagttaaaatgccttaagcatagtatctgttccataggaccttactgattatgcttttccacttgaataaaagagatattaagttgtaataaaactttaaatattttaatttagtttgaatatttaagttgaattaacctcttactacagtaattatcttttttgctaacttcttactacggtaattatctgcttttataaaatccagaaacgatgttatacacattagcacgcattattaggtgcccaaatgccaaggctaaggacacagcaatgctaaggacacagtgtgcctccggcctgcttgcaccctcggttgaaattatattagcaagagaagctcctgcattctgcagtatggcatttttctccagctaatgtatgcaggggtcatttttaaatgttagattcacagatttgcagagctgtgagttgccttggaaattatgctggccagttcctttaattttaaagatgaggaaagtgagaactttcctttttaaaaattgatacataatagttgtacctgtttatgggggtacatgtgatatcttgtacctgtttatgggggtacatgtgatatcttgttaacatgcatacagtgtgtaatgatcaaatcattacatactgaaatatttgaaatatctgtcactgcagacatttgtggcatctgtgtgttaagaacatcccaaatcttgtcttctggctgttttgaaatgtatagtaacttcttattaactgtcgtgctgaggacatggactactgtgctgttgaacactagaacttactccttcatctgaccgtattttcgtacccatttaccaaccctgagagctttacttttgcagtaatagagaatattctttttctctcttgagtatgaaataattatttttgaataatcactgcacgtgaagccctatccttcttgacgttggacatataaatacttagggagcttggtttatagagctttcagtttcacaaacagatgggacagctgaggtgaggcctgcctagcagaagaagccttactcctgatagcaggcactaagcaaggcattgggtgacagattgcttatgcacaggctgggagggacaggaactgtgtcatggaggggcaagactggaactagatgctgaaaagtgaccagatttgtctcagtgggccagtgggaggggcctcattgaaagactgaaggtagatgtgcctcccagggatgtggtggtcatattggctccaaattgccttgttcattattagcaggtttcagcaaattatttttcatgtgaaacgttgctgaagatttcttgggtgtggctgtcatcacaaacaattcctctcttttccatcaaatgtggagttggatgaattccttccttgctggcctgccttccacaaagctgctctctgaacacctgccaggccatgctgaggacaaggaaataccaaggcacagtttctgccatttaatggtggtagcagagacccaggaatgcaatggattattgtcactttcattataacatcatagtgtaggatcataactggaacagagaggatgaagctttcttttggggaattgagggagggagacagggtcttgctctgttgcccaggctggagtacggtggcgttaagatggctcactgccacctccacctcccaggctcaagtgatcctcccacctcagactcccaagtagctggaccacaggtacatgtcaacacacgcagctaattttttagtttttgtagagatgggggtcttactatgttgcccaggctggtctcaaacccctggcctcaagcagtcctcctgccttggcctcccaaagtgctgggtttacaggcatgagacactgtatccaactaagtaggctttatttatggagtttataaagaaactgtttatatatacaggggagaatttatcctgaagaaaaactaaagaaatgaatattttaaatacgtctctgcatttctttttgttggatatgacatttatgtaagaaaaatgctaatctgtatgatatgagacatgttaactacatatggtacatgtatttaaatatcatatgtatttagatttagcaacaaaaagggaaatataaaccatatttccaccatttgaacaaatcgtattcaattatatgtgcatataaccatttgaaaaaattataatgttgatcggatctgcaacctaaaccaagtgccaaattaaattcaggatagataatttcatataaaatgtttcacatcatagaaaaagcagtgaaaattgagtatcagatctgtgaaggatgatacatttctaaccttagaagcagaaaaggaaatcacagaagttggatagattcagccatataaaagtattaaatttctgaaccatgaaaaaaataactaaaatgagggaaacaccagatgtttttcttagtgattcatgtaagttctcatatgtatatcttttcagtgtctaattatgtgcatattttggccagtgggtttgtatctctgtagaaagttctagtaaatactggagaaatactgaggttcccccactccagctctttcactccattgcaaagtaggtcttgtaggtgaatcacacaaacggattaacaagaaagacagaaatgtccagctcccaggttcttcattatgctgttgtgttgtgccaatagaaaatacaatatatcaaattggagaacttgtggttgaaaataatatacgcagattgctggtggcagtattcatggatgtgactttggagtgatttttaaacacttaagtatttttaaatgataagaccaattataggtactaagagtcttgtgttttgaagtgttggagttaatccagataaagttacaaatctaagcagacaccttattaagagatcattattctctgcttttaaagtggacttgctttctatatagttatgaagaacagatagaaatgttttaagattactggctactattaaaataatctggtgactgcagttatatctgggtctaaggcattagactttttggaaaatggatgcttttaatctttccttccgtatatttgtcacccagaattttaaaatttggaaatttcattcattcagtccagatagagaattgatcaattggcaattttattatttttcgctcatgaaaaactctagggttacaagaatatgctcctgaagttaacatagttacttttaaaatgtctcaattctaatggttaggtattagtcctctgagttccggttgccccttaacttggatcttaatttacagtttacagaaaattgttcatatttcatattttaagatcatgtactctaaaaccctattatacttgaaatgaagacctgttatgttatactagaatctctcatgaaaatgtaacagttcccaaggaactttgtttctgtctccatggaccacactggctactgtactggatggagggcaaggcgggagctgagaggcctttgcagaagtgcatgtcgccttagtatgtggcagatcctggtccctggcctgtgctgtttccctccacaccctttgatttctccgaataccaggaaagatcatggattgtctcgggagttagtctcccccttagtacttagcctgtcattttcatgttgcaatgcctagaaaatgggaggtttttcttctccttaaggaagtgttatttcaagatgctttctgctgcctgtgtcatgccagggcgtgggtggatatatttttgcacttttgcaccagcgagtctgcttctgatttgcagattgcatttattataaggcgtattgtccattgatgaataatgtgtgggcattaaagcaaagctgatacatagcttttaaaatagctcatttatcctgcaagcttcacccccatagagaggcaggcccttcagaagcgttttccaggagcaaggtttctgcatgtttccctcagttttggaggtcgtcgttttttgcccctactgtgggggccaagggaaaattgctctgcgccttctgatggtcccctgaaaaatcaactgtcaaaagcccaattaataggagaaatgccatacaactttattaacgtgcatgcagattgattaccccaaccccccaatggggttcagaagcttctataccatcctgaggttataggaagaatggggctcagagcccgaccaaaaacagggtatggtggtcaatcaggttatggtggcaagaaagattcttggagggagagaagaggaggcctggctagcagaggtggccctgtcgtgtagatgaaacctcctaggtagcagccctcacagagaaggcagatgtttctttcagacctttaaagatgtcagactctcagtcaatcttccctagatctggacaagggagggccttagagaaagatggcctcccatcagtgcagtttcctccccaggtgcaaatctccccccacagacctgccctctgaacagccattcacagtgtatcaaagaggtatattttggggtgaaatatttttattcccttcacccctagtttatcatgtgtttccttgatgggctgagggcttgacagatgagcagatagacacaatcttagttcatggaaaaggcaagaatagagatgggtagcggagagtttttaagttgctgctgatgaaatagacactcctttgtctcagctactgaaaattttctttagaacgtggatttaaataaagaaagaaatagacatcatgctttgtaatgaagtcctttggtcatcgtaagtggtcacagccagtttatcctcaggcttctttaagctgaccagttaaggtttctgcagaggttctgtgtttgagggaggagaggaagtccttggggaggaggggagcgttctatgggagacagtgctcttgggagcattctttcaatctgatacccatgcaagggtgatgacaaggtatggccttcagtgactcagagcctcctcccttcccaagcctcaggcctgaaagtctggtgatcctccctggcagaaacctcactggggatcattttttccttttgaacaagtttcttactttgcctcatatgttccaatcttctgtcagtggccaggtgacatctgttggaatgctgatgtgtgttgccaagcaaaacagatgcaggaagacttgcccaaagtgggggaagagagggaggaaagggaggaaaagtgggaggtagagtgtgttagctggggagatgggatcgagcagtatttatctatagaacagatatcaaagattgggtaaatcatggcttaaaactctcagaaaagcattctaggttcttgcacatctttgcaaggctactgaatggctcatttttatttcccaccctgcattcagagtggtgtttaaatggctcaccgcagcaaaaaggattaggtattacccttgtgctcaacacaagtctgtggtcagcagatttttaactttatcctagtttattgatatttctgtcagtgaacaggtttaactcttaatggaatagaatctaccaagaataatgcagactggataaaaagaatttcactgattttgattatttagcacattaaaggggacccctggccagaagtagatgtattgcttgggagaggagggcatagtacccaggtggtacttcagggattctgattttcagtcagggttgagaaaaactgatttaagaagttaatgctactgacagcctaaatctgggtttccttgataacctttggtgtaaatactgatttaatgcatttttttttctcacccacttttccttcatcaccccaaatctatattgtgttcacatggttcctctttctagaggtgggagatgtccttttatggctcagaggtccacaaaataaacttgcattcaagcaaggttgtaaaatacctatgcattaagagcagtccagttgaatatttgcaaagcatatataaaagagcttctctcctaaaataactgaaatgaaaggattaattttctctcagtttcctactgcaagaagtaagtaaaagtggaattccaattctagccatggcaagaccggtctatcctgttatgtcttgtgtgccaataccacttttctccaggtaactaaagtatctccctgctgtaaatattaactgagtgcatttttgtggcttttgataactccacgtcttgaaagtgttggccagttgtcaaattttcatgaatttcagagaagtgggtaataggtggtttctctcacggtatttaaagcgaagtagtaaagaggaaaaagactgaaaaggtaacctgggtcaactcattttttagggcgcacagaagtgtggtagcggagcctggacatcaggtggcctgaagcccaaaccaccagctcccccagcacaggagagtgcaaactgtagctcagtcttggccatctggggtcttctgcaaatgaactgcccatagtctggccaataattcacactgttgtattgctgtctttcattctctcttaagtagagcgttctgaacatatctgaacaattttttgacacgctgttactctcctagccacaggttattttatgacctagtcattctttacataaataaacatttatcaacagtgctgtctgggcctagtaaggtatatagcctgctttgtttctgcattaaagttcttagaccgccatgatcttgagatgtttgctgcttattgtttctttctgatttctattgcttatcagttactactacttgtggctccaaggatagaggccgattccctcttctaatttgctgcctctcatctgcttgaagtttaggtgtttagtcaagctcactagcattgtttataaaggaagaataaataggttgagagtgaggacttagggtagttacctttttaataatgtatatgatctgtctttggtctttctccctcatatctctgctgattttactctcgtcctcctggaacgtctctggaatcagatagatttttgtaagatttggatgtaagaattcagtggaataatatatactagctgtttagcctagtgctcggcacatattaatgcttaataaatattagctcttattattattgtttttttccctgaaagagaaaatcttaattcctcacagatgtttaggaattggatatgtagcaaccctatccactgaattagtatcagcaaacacatttttagttcatcttgatttttatcttcattgggattatgcctttatccctttagggttaatgaatttcctactgtgctgttatggaagaaccctgaaaaaaaaatcaataaaatgtatccttaaaaaagattttatgattcacttgactaccaggtgtcagcaacttttatttttattactttaagttagaaggactttgaaggttttcgtggtttattctcttcttttttaaaggccaaaccaagatcactttttggtaatggctacctttcctctgaatgtatttctcaaaaagttctttctggtttttattaaacccaaacagttgttataatttaaaagttacccttttagagtgagattagctagaaaagaaattaaggattattttaagtaactcagcaagtaaccttttccaagaagcttagattataaattaacgaaaaccaaattataaaccaaggtgtatggttgattgtgggttaagaattttatcagcagttttgctgttgtatgtaccagtcgtatattttactactgagtagaagaaaagtctaaaaatcaagtgagtagtttttccttagctggttatcatgtttgtttgatcattatattaaagtgctccttttatttttcgttttgtatgttttcccaacttaataatgaatgtgcttctctctaatctaatctctgaatttcaggagtctattaataaagtatgtgtaaagaattagttgctaattttggatgtggctgaaatgagattgtcagcaaattacaacttcaagcctaggactgcagtgttatggattgcacctcatccttggttattgaagatatattcaaaatttatgaaaaatagaaaaaccttattacttctgaatttttccacgttagactttccttatacttttaagatagtgaaagtgttattatataagatcatggaaagtttgtctttccagacctattttatgttaggattttacaatattaaattcataagataatagtagagactagaaaacaaatccttactgataatgaatttcctaagtagtaaatacaaatgaatatttatttgtaaacctgggtgattaagtaatagctgttcagtgatattgatggaaggaaattaatattatttaatccaaaggccaggcgtagtgactcacacctgtaatcccagcgctttgagaggccgaggcagatagatcgtttaagctcaggaattcaagaccagtctgggcaacatggcaaaaccttgtctctccaaaaaaatgcacaaattggccggtatgtgcctgtagtcccagctattcgggaggtaggaggtaggaggatcacctgagcttggggaaactgaggctgctgtgagctgtgattacaccactatactccagcctgggtgacagagcgagaccctgtctcaaagaaaaaaaaaaaaaattaatcccgaccttcctccaaaaaagaataaattaagtccagaaagtttggtgattcacttgctgttgccgcctttataaacataaaagtcagtaaggctaagggacacttctgaattccttctgctgtccaggtactgtgccgagttctagagatgcaagtagtacataagacagatgtggcccctgcccttgtggagactgcagaccatggctctttttcatgaatggtagagacactcataagtcaaatacctacatattttcatgaatgtgccaaaggaggcaaacaggaagctgagacaggaaatcatggggaggcctacttgaagagaggtaaggaaacccccaactcaggagtggcctgtaagctgaggcctgggaaggacccctgtgggcatggccagtggaactgcagcggaagcagccgttcgcccaaaggtcctgcgctgggaagagagtcagagatgctggaggatcagaaagggatcatccaagtgagtggaggagacagtggtccaggatgagcttaggggaaaacaggggcccctggattgttcacgctgtagaacacagtcatgcatctgatatataaatagcatggagataccctcagtagatgcaaaactcaaatgagctcagctgctctgaagcctgggaaaagtcagcaatttgtaaaattatgacacatccacattttcacaggaaaaacaaagactagtatgtaacatctcctttggtatttacagaggatctctctctctctcgttgttactcttacaaatgataggaggccacttttgttttccaaattctgtgccagatatcttgcctttcctgagatatagacacggtagagtcaggagtgtgtgtgagggcttgcagacttctttttatgtctttagaatccttcttcacttttgaatcatttggtccaggagtttaaggccttttcatttggcttttgttgttcatttgttgaacataaataactgtgttcattatgcagacaccgtgtcattgttgacaatttggtgttgtagattaaggcaacgtgaccatgtaacaagttgggcaaatgcacttatccattcagtgagctctaacctacaaggtgttttgcttcagaccaaaatggtagactgcagaaccttcggcgcggattttaagtccatctttaaaaccataggtagagattgtatctgtgtgttcttctttaattaaaaatgggaaaatgatgcgacagagcaaagacggccatggatcctttttatccctctcccatccacacagagagtttatttcccctcccctggagtccaggctggccttggggttgccctgaagtgatgccgggccctttctacacgtagcctttcaaaggaccggcagcttccacttcctgccttttggaaaagcttgctttagggatccagctgccacctaaaggccctgaagtgagccacgtagagagaagttccagctttctagcccatctccaagtgtcaggcaggtgagtgaagccatcttggatgctccagcccatcaccatccaactatagtcacataagaggccactgatgggcccagtccgtctccacactcctgagagttagtaagtggctgtcgtgttgggctctgaagttgtagactagtttgttagtgacgtataaccaaaagagagagtgtacttaacatttagtcctgggaggttcgaactttgcctccgcctgtacgtgagctccctggagtgtgggatgaaggagtgcttggcccagttgttttcccggaagctggaggagggcagccatgcacaggttgtgtagaccaaacagttcagggatgcacttggcttagacagctgataaacagctgcagtgcccccaagggagttgaaagagtgggtattttgttgtcaggagtagaattattcaccttgaagaacagaagatttgtagtttaaggaaattcaccatattcttaaaagttgcagaaagagaagagttcttagcctaggcctgcaccaagatccagttcttttgaatctgatttaataggcagatgatgaaggacttattcccaataataaagaatagttcaataggaggttggtagtcttaattgtcttccttgtcaaatcctagtgaatttcacatcagatactgtgccctgtgaggctctatcaccttagcacttggtaatacgttttttatgtagtaggtgctcaataaatgggttgagtttctataataatttgatttctgtagcatctgatttaactaagtttgctataaaacgaaatctgctattgtattcaacatcacaataagcagtatcagttgtaaatcatacctacatacagttaacccttgaacaaagtggaggttggggtgtcagcatcttaacacatagttgaaaatcttttgactcccccacaatttaactagtaatagcctactgttgacagaagccttactgataacttaaacagttgattagcatatatattttatgttataaaaattaaatactgtgttctcataattaaactagagaaaacgttaaaaatcataagagaaaatatatttgctatttattaagtggaaatggatcattgtaaagtctacatcctcactgtcctcacattgagtaagctgaggaggaagaggaggggttggtcttgctgtcacaggtgacagaggtagaaaatccttgtataataagtgagctcatgcagctcaaacccatcttgttcaagggtcaactgtacttgaatggatttttttccctgtcataattaaccacccacacacatcttactagaccaaaaaagaaaacttgtcaagcaaataatctcccatttcttgggtcatttggagagataacacaggccaggttatatgtcctgaaagatgagaatgtgtgaagtccccagagagtctgatacgaggccttcttccagggagtagtggtctggccgctgcaccagcctgccccctgccatgccctgactcacctgcacatcatgggtgctgctgatgcccaggcttcatggctgagcatggcacccttagcacccctcacctgttacccaacggagatttgtgggtcggaggcatttcaattggagaaggatggaatggctgagggcaggaaaacttaacaagcaggaagtctgcaccctggctgcacatgagaatcccctatgggcattgaaagtagggggagcattgaaggtagggggagcattgaaggtagggagcagtcaggtcccatttcctaagcggctctgcaggcctctaagcttgtcagtcatctttttggtgctgtgtggactagtgccagcaggaacaactggatagttttaagtctttggcctcttctgacactttttaaaccaaacattttattaaattctcattcaagttaatagcaaaaaaatattactactggtttcatgtttaggtctcatttgcagtttttaaaacaacctaacggagtatagtaaatacataaagtactcgatttaatgtgcattttctttttcgttttttttttttttttttgggtggggaggggggtggttttctgagacggagtctcactctgttgcccaggctggagctatctcagctcactgcaagctctgcctcccaggttcaagtgattctcctgcctcagcctcctgagtagctgggaatacaggcacatgccaccacacctagctaatttttgtatttttggtagagatgagttttcgccatgttggccaggctggtcttgaactcctgacctcgggtaatctgcccacctcggcctttcaaagtgctggaattacaggcgtgagccaccgtgcccagccctagtgttcattttctgacaagttctatgaaacctggtgacttaacttttctgaatctgtttccctatttgtaaaatgacaatacttgcagtagagtttatgtaaggaattaatgagggtaactttaagatctttgtaaatgctaatgtgttttacaattgtggtcagctataataataataataatattattattattattattaataaaatgcttactaggcgaagttaatagctcccacccattcccaaactacttaaggaggattttaagctggaaacagttaaggaaagccgcatgatgccatgagcaaagccttccatctgcacttggcatattgcagggtctgtagttgctggaatgcctatgtccctggttacgagccttgatataattgtgctaaggcattttggtggagtggaccgtgtcctgctgttgatcaaacatttctgtgtggagagactttgtttttcccttggggagtatttattttttagtgccaggctccgggttggctgtgctacgcttggcttttcagtgccaggcatacaaccatgtcagaagggggactgcatggtaggtctcaggaagaagggccgaggaagaggagaaaagggacttggctgtggacggggaatcctgtgtatcttggcttctctgagccagctgtgcctcagaactttgatttgatctttgtaccccatgggtcctgccaggtgaggggcacaatggagaagagaaaaaaaaaaatgctctgctgaaaacataagcaacaaataaaatagaggatagtaatcctaggataatccccgaggcagcagagaaaggcaggctctggcttgcatgtcaggagctctcttcctgggggcaggagggagggtggtatagtcccagatgagtgcttggcaggttgtttagagcctggtagcagtgaaaagaaatgtctaccaggcatcttgtgcatgtggtagatcttgacttgtaattgtggcagtctcccctaggctcctcggcagctaggtgacagttgcctgctagttcatgggtcaccttctcaccctctggcttgcttctcagtgggtgtaaatggggtaattaaaacctgtggttttagactttgctccaaagactgtttctggggttctgcagacattgacctgaaatttatttttattatttttaacgtttaccacctgtgaagatactgtacatttaaagatataaaatgtatcatattaaaataaaatagcctgtatgttttacattttgagattctgtttatgctgtttttttaaaaagttagaaatgtattggcatgttctgatagcttatttttaactacttctccattgttgtaatatcataacaggttggactggctaggctatggtcagaaattgcttatcagtgttttatacatacccaagggattccaacacagggtgtccatggtcctctttgagaaaactttgtctaaaagatattgaatgatgcctcattaaaaactcctcagaaatattttctcctggcttgttttcgccttccgtgtcattgtttgagaaatatccaagattccttcttttttacaattaaaaaaaaaaattgaagcaagtccataatcccatgtagttctttgatagaattaaacttcagataggcataagaaattcagataggctttctctccactggaaatgcatgcctttcgcaatcaacagtgtatgatgtggtctgttctggagttggggtctgacccttcagcatggccagcgctatctgaagatcagaaaccctggaagccccttgtctctttttcatcttccacatctgtctggcgtccaggccctgcccctcctgcctcttcactgccactgctgtggccagcctcttattcagaggagtttcctacctggttagacacttaaccacctccagacggaccccttctaatccacgtcccacattatagctcaaaagtatggattttacagatcttatcctctcctgttctgccaaaaccccatacggtcctccattaccaatcaggtgaatcgacttgcatttcccagcgtgtccccacacccacaaacactccatgacactgggcccgtccctgcctttattccctgtggcccctgtgtgcaggagccttccctcccctttctatcagtccctcatgtacaggccttcagccccctcactctgccctgttcctacctccatcattgtgccatttatgtttgcatgtctgtcttctctgtcatatctatctcaaactaggttgaaaattttttgaagatggagattttcagaataaaattgttcacacagttatatatttgactgattatacttttatttttatttatttattttttttgggatagagtctcactctgtcacccaggctggagtgcagtggtgcagtctcagctcactgccacctctgcctcccaggttcaagtgattctcctgcctcagcctcccaagtagccgggattataggcatgtgccaccacatccagctaatttttttttttttattatagtagagatggggttttgctgtgttggccaggctggtctcaaacgcctggcctcaagtgatccgcccaccttggcctcccaaagtgctgggattacaggcatgatccaccatgcctggccgattatacttttttaatgtgttagttaagatgagagagtccaaagtgatacagcccctgcccccacagagcttccagtctagtgagagaggcaggtaccaaaaagataatgcacatgacagaatggactgaactaagtagtagtagaagttcaaacgaagaagaagacacaaatggataaaagctatggattctcaggattgaggatgctgaaaggctgcacaggatgaaaggtgcgaccaagggtcctgaaaaaggcataggatttatacttgcaaaggagggcatttccagcaagaaggcttggaaatgagaaaatctcgggagaataggcccatgttagaaattcggtacacgattgagaggaaaagaagtgccactggggaagtgtgttgaagcaggtatgtggatgttcttccctatgcagtggtgtcagtaggattttttgttggtgtgagatctgggatctgtttgtaagccgtctgagagctgggactttgcattgatcaactttttgttgcacatgctctgtgatgtaattggcactgcatgatttgacaagaatgtgttttatgctctaaatcaggagtgagcaaactttctgtaaaaggccagatagtaaatattgtggcctctatttagtccattctgaatgtacattagacacaagtttctaaagtacattcacaaataagcattatacacttagttgtaacatacacggatgttgagcagagaaaaagctctctgatttttgtggttcctgctctaagccaggctaagtggtgttgtcagggttccaaccccttccatccctgaagcacactcagcaaaccatctagtttataagccacagtgtgctagtaggtgctgtgtgtatttttttgcggggggaggaggtatttattttgtttttgagatggggtctcactgtgtttcccgggctggtctcaaactcctgggctcaagtgatccttctgcctcggcctcctgagcagccactgcacgtggctgcatcgcttttaaaggtagatgatgcctctggcctttctcattgcctctgggtgtgtggcccatgtcactgtccagcgcattccactgtccagcccattccactgtctggccccatgccactgtccagcccatgccactatctgtgtgttccgtgccactgtccatctgtgtagggaagagagcaccaggggctggcctggtcaggagagctttctgggcaggggttgagggaggcacatgtgagctggactttgaataaaaagaaaggaaagccaaggagcagaccgggcgaggctgggtgcgaagaccagatgtggcagggatttaggaggcagagcgagcacaagtctgtgcatattggtaggttctgtagacttgtcggttgtgcagtggattcatggagcctgtcgaggaagctacctgtgtgcttccactaggaaagcacagccacagagagaagatgaggggcagggaagcagtattgtggggaattcggagtgagggctgaatctgagaaatattattttaaaattatgttaaatacattattttttgctgtctccaaccatcattactatgttcactgtagaaaaattaagaaagtcagtatggcatatagtcccataaccaagaaattcattcattgtgacctatttgagggtcatttaaaaatgactgatgtaatttggtaaaagattaatcaacaaaatgacttatttcataattaattactttccactaatgtgacatttctcaaactctgcagtatttccttttcttcttttcttttctttttttgtttcctgagacaaatctcactctgttgcccaggctggagtgcagtggcatgcaatcatggctcactgcagccttgaactcctgggctcaagcgatcctcccgcctcagcctcctgagtagcttggactacaggcatgcaccaccatacccagctaatcttttatttttttgtagagaaggtgtctcactatgttgcccaagcagatcttgaactcctgagctcaagcaatcatcctgccctggcctcccaaactgctgggattacaagtgtaagctgctgtaagctgctgtgcccagcctatattttcaagtctctctccttttttttttttttaaactggaaaggatagctgtgatggaaatggaagacttccaacagaataccttagttagcataactgtgtagtacaagatgtaaaaacctgttgaagtgggtggccttttgttatcattctgtctttctgcccaccctgtggcacagttctcaccatattttctgtcaactgctaccacatggtccccttctttatgttataaagtctcttaattattaggtaattattcattgtcctagctctccatgcttaccaaacaatattaacaagagcacggtattacaaatgagtcaataacaacttccctaaccttatggcagctgttttggaggaaaaagaaaaaagaaaaaaaaactgcctttttttttcttaatgcgttacaattggttgatcagaacagttttaaaactataaaatgttggctgggcgcggtggctcacacctgtgatcccagcactttgggaagccgagacgggcggatcacgaggtcaggagatcgagaccgtcctggctaacattgtggaagcccatctctactaaaaatacaaaaaattggccgggcgtggtggcagtcacctgtagtcccagctactcgggaggctgaggcaggagaatggcatgaacccgggaggcggagcttgcagtgagccgagatcgcgccactgcactccagcctgggcgacagagtgagactccgtctcacaaaaaaaaaaagcaaacaaaataactataaaatgtttaataaacatattttaaattaaaaggtaaggttgtatctagttatttatacagctatttttaaaagtcaggttggcaaaggtctctctgagtttcacaaaatatccgcgtgagtggtgcatagtttgtgctggcttatttccatttgttcgttgtgtttatggtaaccagtagcattttctaatttggttaaaatgctgtcattagctggtaaatgcagtcctgtcacctcagaggaggaccaagaaggagctctttctagaaagggagggatcgaattactcctcatcctcatatctacttatctatctgattttaagacaccactgaaatttatactgcgagcaatttaaatgaatgcagtaattgattgcaaaacatgtttgtaatatcagtgactgaaattaaataaaagataagtcagtactttttggatcaatccagttgatctaaaaataaaaagtagacatccactgaatggttgggtaaatgaacgaatgaattttggcttatgtcagtgaattggcctgactgggccttgatctacatagcttctcttgacattttgttgcccaaattgagtttgagtgtttttagtaggcagggtaaattagcggtatggatgggtataacattctacatttagttttgctactgtatatgagctcatgaaatggacttcccttccctaataatatagaaaaaagaaaaacctaaggaaatatagagaacacattcaatttgggaaattcccgtctgtatcagtcaaggataggctagatcatgttgatcatgctgcgtaacaaaccacatctcagtgaattaacccacaaagggggattttcttgctcacaatacacaatctgtgtcagcaggagagcagaattatctgtcgtcaccaagagtccccaggatgatgacggctaatcccattgtgccttcaccatcactgccataggtgaaaggaacgtgataaattgcacactgccttatttatttatttatttatttatttatttatttatttatttagagactgtgtctcgctctgtcgcccaggctggagcgcagtggtgcgatctcagctcactgcaacctccacttcccgggttcaagcgattctcctgccttagcctcctgagtagctgggattacaggtgcacgccaccacacctggctaatttctgtatttttagtagagacggggtttcaccatgttggtcaggctggtctcaaactcctgacctcaggtgatccacccgcctcggcctcccaaagtgctgggattacaggcgtgagccaccatgcccagcccatacactgcccttttaaagcctgtgttcgaaagtggcacacatcactgccgctcatattttactggccaaagcaagtcacgtggccatgccatttcagattgggaagtacatttttaccattgcccagaggaggagagagatatgcaatatttgagaatagccctaaagactacaatactatcccttagtccacctaaatgatcctgaggctttggggcaattaaaaaatccttactcttaaaaaatgtcaggcagtaagtcttgaagccagctgctggtgctacacaacatacccttgtcttgtgaggaatcccttttgaaaaggtaacttacctcgtcacttcattattgctcattgctacaggttgaattgtgtccccccaaaaagatatgaaatcctatcagtacctctttgaaaatagggtcttatttgaaaatagggtctttgcagaccctcttgcagatggagtcaagttaagatgaggccatgaatgtggaccctaatctgactggtagccttataaaaaagggaaaatttaggctcagaaacagacatgcacactgggagaatgccatggaaagatgaaggcagagatcaggtgatgcttctacaaggcagggaactccaaagattgctagcaagcctccagaaagcaggggagaccatggaatctccctcagccttcagaaggaaccaccctgcccatatcttgatcttggacttccagcctccagaacttttaaaccatcaatttccattgtttaagctactcaagtttgtggtactttgttacagcagttttagcaaactaatatgctaatcaatatatatttttatcatcttctttggacctagcaaggagaaccacttgggaaattgaaacaaggaccctctcgggaaagtttggtgaaatcctggccaacatgatgtctaatgctgattgcagtgaaattgagtactgttgttgatttttttttcctcaaagtagcttttggaagtgaagagtaaaatgtgttagtgggaactcagtattagcaagaagagaaataagggactatgctagcaaaatgaataatctgtctttattatactgtcacaggtggttatcaagatacagtttttgtgagacaaaaagctttgtggggctggagttgcttttgatggtggtggcagagggagagttatacgaatagaagtaacttctggtagtgtcttcgttgcatgtgggtacacccagtcttatgggcaagctgattttatataatcttgttcttttcagtaaattttgtatatcaaatatttaatcttacttctttgaaaaactttttagataagtgatgtttgcaaattgaagcatattgaaccatatatctggatattttgtttgattataaacccatttttacaccatggccatagagaatggtgccgtgggcactatcaggagtgatgtcattaaccccacagggctatgtggaaagcgtgtggctgggactgctgtgtggttgggacaaggcagtggtgcacatgggccagctcctgtaactttcctgtttgtggctctcatggggcactcctgctcctgctctccccgtcctcatccatgatacatactctctctcatctacgtgctcataaatttcagcagcaagaactgcatgatttttaaaattctgagtagatgcttccagcaaaggatttcctaactgatcactgccagagaagaagaggtgctaaatagttgccaagttacatgctttttttcccaaatgaagtacttcccctgctactgcttgtaaagccctgattgtgtgtgtgcgcagaacccacatctggtgctggaagcctaaggactagtgagtggtcatgtggtttatggcccctataaaaggacccattctaaaagtctccaagaagctaactccacaatgagatgatgtgtgtgtgggtgtgtgtgtgtgtgtgtttgagatagggtcttgctctgtcacccaggctggagtgcagtggtgtgatctcggctcactgcaacctccacctcccaggttcaagcaattttcctgccttagcctccccagtagcttggattacaggcatgtgctaccatacagaattcagattcctctcctacccctagcctgatgccctttcattagctatacaaaggtggttgagtttcaggttaggcttattatcgtttaaactataaactaaatattcaccaaagctagcccagcctaagcccaggaataatcaaggcagcttgaaacctaaaagcaagaggaggctgggttagatcagctcactgtataatttttgcaaaggcggttttattgaaacctgttcttttttgaaagctggctctttctaacattcaaatgcttttgatcaacctattttatggaagcagaatattgaaattaaagtaaatattagatgaactttatagccagttgttttcctcattcttcaactctttaccctacaaatcttatttaaacaacatgttcagcaagctgttatcttgcttacgcaatgaatagaacattatgttctaaggtacagtttgctcacctatgaaaagaatttaacctcttttctaagtagctatacacaattgtcataccttaagttcttatttagatgcatttcagaatattagagcattttgcaagtagatgcacgttcttacccagtgtcagtgtttatagacagacactcaccatgggtatatttaagtctagggtggtaaagaatataaatgtcatttattaaaacctgaacatagccaactatgaattatttgtgttaatgtaaacgtcgaatgagcactgcaaacatttgatgtttgaatatttgcctgtagaagtgcagtactatgttctatagaatataagtagatgccaccccagtcctcaaggtttcagtgaggtcatcattgtatcaataaaggtgccaatttaagatgctaactggacattggaaaaaatttgttgtcctattctgaaggatgagtcttatataaagtgtttttaaaatactttattgaaactgccatgttcttttcaattttggtagctcccctgcatttaatttagtcataagcgtctgtattaatgggtgtgttcaatatgaaggcatcctgtgaagacaataaattatattatacttatctagtctgcactctttatcatgttgataaaatggcccttaccagtaaaaaaactgtttcagaatgtgtaagagtaagtctgtctcagctgactgagggcttcatcatgttcatgataatcccagcagcttgaaatgtcaaactggtagctgatccatagcacacagtagtgctaattgagataggttggtgtggataattgaatttaattgaatattaaacaccagtaagtgctatgctagatgttgggaccacagtgatgaagatgacattatcctgacccgggaggcgctccttatgtgcataaactgcatttggaaattttcatgatttgagagtcatctatggttgccagtagagattttcccagaaggccaaggatatatggggacatttgactgttctttgaccataattatataactttttatttgcccagaatgaacaactgcagggtaacatttatacaaaaggaatttagtgtgcttagagtgctgataatacttgagaaactaggagagctgttttaaagcacttctttttcttttttttttttttgtttttttctgggctgttagaatttgacattgttcaactttaactttgtcctcattgaactttatcctgctaaggagctaaaaggtccatatgatcaaaaaggcagctctcaacccagcacgaaattccaggctcattcatttctgtttacctactgccaaataagtcagacaactgcatacttgctttacagacgaatagaggacagcatgttgttcaataattgtagtttaaaaagtatatgtaagatacatccacaagaagaaagatagagggagcataccgtttgtcttctagtataggctccctgcccatggagatcacagagtagaattatgatgggtgccttagagaccagcctccctcaggatcatgagttcacctcggcaccacagctctgggcaacgtggaattagacaaattaaagtagttaagttctgacttcatagaacagaatctaaacttttgttcatactgcttttgtgttcttgggccatctgaaaaccttttctgtgtaaatattcctgcaatatgcggtcttacagaggtcttatcacgcatatttccctttgcttccttatgtatcgtattttttcaagaagaagacattcaactttagagacaatggaatcattgtgttgtggctttaattcaggtcattgtccttttgtgagttgcacgtgtgcgcgagcctgtgtgttttgcttggaggaatagtgaataagcaaggagcagagtccatttgctttttctaacagagggtggggcagattctctcacaaccattaaagaaaaaaataagataccagcaataatgataatcagtcatgcatatgtaatcgtgtgtagttcatacttcagattcatatacagctgagcatgatcttgaatgttacaggaagcaagcttgaaagtcaagttacagtagaactttgctaattcatgcctgactaatttgcccacccagtagttcctactgaaatcttgccattcctctaccaactttcagaaaaatttgatagcaggctgtggagaaggctcatgttacttcttatgtcaaggtgtaaacaaaaaagagagcacaaaatacatccatcagaccacatgaagtgaagagagagaaaacatctgctgaaagccggattctctgtttttttcctgctttttaaatgtaatctgtctttgtttatgcatgccctagaaacatgcataagtaaccctgagtagtctcttagtttaagaaaacctactataaaatttcttgttgtaaaataaaattctaaaaggaataagttgtggacatataagtatcagacagtttatgtaagactttacataggatgcaaggtaggctgtaatatgatttggtaattgttttatgggggaattttgttttgtatagcgaaaaagaacagtgagtgatttaactgaattttatagtttaatattgttgttgttttaactaaaatctttggtttgctattgcaaaatgaaagagaaaggaaattttggttaatgttaactttatttccaaaaccatgtgatggatgctgaccaaatgtgtctcaatagtgccattgaggtctgttgcctttttttttctttgaggtgctaagtgaaatgtgttttgaaccttgaatgttcactatgcgacgttctttgcattacaggtagatactgcaaacttgcttcaaaaaaactaaaaagttcaaataactaatggttcatatttgttccagttagtaaatatcacgacaaggtatcatcgtcatcccatgttctcagtatagattcagcttcatttcttacaccacacacccagaggcataaatggaagtacacagacaaaaggaaaggcctgagtttaaatgtagttatcatgttcagtgttcgacattttattctgagaatttaagtgtttctactgcagtaccacaaagtcaatctgcatattactttaactagatcacttgtaaaaataaatgaataaatgaccagtgatggttcagtgacaagagtgccagatgagtcatgaatgttttcacaagtaaatttgatagtaaactgctaagtttactgtatacgctgtgtacaaattagctcagattcaagatttttgctctaacaactgaacgctcagttgcatctttaaactttttgttgcgtgagaggggctgaggggcaggtgggaggaagtcagcctgcaggtgggaggtttctgtctcaggattgctgatacccctgcatgctgctgggttgcagccttggagtatatggcctatgagacatggcatgtctgatttgatggaaaaagcagcggagaaccagtgaaccaagctattccgtgtattgactttttaatacgtttactacaagaatctgccttttaaagtacttttaaataaggttataaacataagtgtgttttggacacagcctgcagcaagcatgcctctcgaggtgtaagatgagtcagctacacatgctcaggggcccgttccaccagccacagtagctgcagagggtgagagcaactgaagcaagagaagctcttagtaattaggggaaggaagcctccacttgacaccgcatcaccaccaagtatttattgagtgtctttggtgtgcaaggcaggagaatatcttctatggattctacatatttcagggttaccagagttataaaatcccttgaaatctatatgcacaaattgtaaatacgtatgcagctttttataagtgttcaaattctgccttaattgtgctcaaggatcagggtctcaccccagcattgtataccattgatagtcatgatttccttagtgaaattaagtaaattgactttcagagactttatttcatattcatcatgtccccatgtagccatgaaaaaatgatatgtttaatattcatctatttgtatgattaaaacaaaatatccgcaactactgacgattcaatgatcagatattttactgtaaattaatatcatcataaactcctagacattagacttcagacattcagagcccactcgatgcttggcacaaagcaggcaccaaatacatatttatagaatgaatgaacaaatgaaggaagaaacaaagaaatgactaatgcaccaaccatttatcaggaagtttaacagggaaattcaacaaccagatttgttttgctaatcttattaaagtgcaacatgtttgttgtaaaaatagatccacattcgtcattgaactggacagtctaaaatagatccaaacccattgtttgattatacttcacaaatgtaaggtaaaatagatgatactatctgtcatttgcttgatgctattggcaaatgtgaagcagttaccagcataaaagcttggaggttactccgaatgtatataaacaacagtggctaggctcacaagtgggagagagtctaaaaataggtaggcgatcccttatctcgttgcattgaaaattgtgtttatatgaagtgatattattagaaatgatgtgtgagaaaagaatttctgcaatgtctcctacaaattagagtgagaaaatgtatctttatgcagctttgaacaaaggattattattgctggactgtggaccaaaattttagtcaagttttttttttttaatgaaaagaaactgttcatttatgcagacatacaactttgtgtcctatagagacttgtcatctgctcttaaagttagcaccctatttttcctctggatgtccactgagaaacccactggtgtgatggtcattgaaaaagagagttgtgtcagaatgccctaaaatcttagtggcttaacacattcccaagtttatttctcattcacactacccgtcaacataggttggcaggcattcggatccacagggtcacacagagaaccaggccgaccgacccacatggtcacacagagagagaaccaggccgaccgacccacatggtcacacagagaaccaggccgaccggcccacatggtcacacagagaaccaggccgaccgacccacgtggtcacacagagaaccaggccgaccagcccacatggtcacacagagaaccaggccgaccaacccacatggtcacacagagaaccaggccgaccgacccacatggtcacacagaaaaccgggctgactgaagtttgcactggagcttttcacagcccccactcagaggtgagataggtcaccttttctcattagccaaaactggtaagatggccttccctgaccacaaggatgctggaaagtgtagtcatcttttctctgtgcctggagaggagagagaagtgaaaattggtaagcaatatttctattttaaaagtggttagagtgtagtgcaatgaatctagcaccattggttcagttttaaatggactgattccatttgtctaattctgtgtcagttggctgttttctgacccctgagaataatttagtctggctgattcccccattgtaccaattgcctggcatatgacaaatgcatttttgcctgtaagacaatctttgcctaggaaagacagccctaatttttatgtcttgtattttccagtaagctaatctggagtatcagtttttaagactgatacacaattagatgaaactaattaaggacaaaacatttgccacttttaactgttgataagtgaaactgagatttccccccaccccatggatacagtgaacatttgtcagcagctggtaatggctagtataaagatgtattcagttttcccttcccttcctctccctccagccttccagccacccccttcccaaacatttatgctcatttagagaaaagcaaccccagttctcttacctgggatatcaccagtataaaaagcacattcgtataaattatctggcctttaattacctgtaaccctgtaggaaaccccctgggaaaagtaccacaaaagaacgcagctctgggggtctgtgagaggcacccagttcacacccctaaaggacagagcgagcactcaaacgcacagctttgggtgccctctgaggcgtgcactggctggtagcagtgggtatcaaccatggaagttcacggaagattaaaccgcaagttcccacgcaaggccaagtggctgccaggacttggaggcactgaccctgagtggtccttccacctcagcgtatactgtcactgctgcctctgtggcttcccctttccctccaagtagagatagatgtctcgaggtgctccccaccccagccaggttgtcctctcctgggtggcattttcctttctactctctggggctttcaccaccccactgggcataactctccacaggctcccctgggaggggtgcccccacctcacccgccacctcacttctcagcccctcttcccatccaagggctccctgggctgcccccaccctagtcatgatctcgctcctctactctctcgtagtactttatttttaccttgctcctggctcacattacatgcttatcttgtatttatagatggttctatatatgtctccttttgcatccttttctcaaagctcctgtgaggccagggatggttttatgccttttctcatccccttatgttctagtataatgctttacacatgattaaattctcatcagatgttgaatgaatgagcttattatgcattacttcttagtacaaagaaatatttggaacgtaagctctgaaatgttgatattctgtggatgcttggattacatacaatgtcctaaataaacacttgcctgttaagtagaagtcagtctggaaagtgatacctttagatccataaaatgtttataaggcacatgaatggacaaccacgttgttttttgctcttttatatgtttaggttactgacagcccaaaatacattagcttgtctttgggctaggaggtacctaaagttgtatttttctctcatgtcattttcctgggtttttatcatatccaacttcgtaatgtccaggaatttgagattaattcctcaaacttgtcgaataatacaagaggaaacttgtataatacagagcaaacttggttggtgagtagctgctagagcaaacttggttggtgagtagctgctacagcccatacatggatttgtttcttcaggtggggggataattgtatccatggactcttcttcattaactgacggatcaaattattttatgaagctatgatgagaaatggcttgtgctcttgggaaaatcaatgccaatgtaggtaatgcaccagtctagctggtttttaatttaaagaacaaattatcttctggaatagtaataaatccccctttggaacagcaagaagacatcagctgttggatatgggataattaccatatgtttcaatgtcgtaaaaaggcacagcaattttaataacccaggttgtgtacaagaaagctcttgcttctgaagaatccatcaaccatgcgctatgatcatgtaataataaactgctgtttacttaatgctgtttttatttaaagttttaattaacataacctagtctttgcaaaacatctgattacctttgactcatatgttttctggtatataataatgggttctcatgagttgtttattttataagatctcctgtttactcagagtaaggaaaattttttttgaggtaaggtcttgctcaggctggaatgagtggtgcagtctcaactcactgcagcctctacctcctgggctcaagcaatcctcccacctcagcttcccaagtagctgggaccacaggcacatgccaccatgcctgactaattattgtattttttgtagagatggattctcactctgttgcccaggctgatctcgaactcctgggctcaagtgatccttccaccttggcttcccaaagttctgggattacagtcatgaaccaccatgtccaaccaggaaattttggtattaggaagtttcccacataccatttgtctttggtgccatgaacacctattttgtctaatttttataccaacctttcactttggcacatgggaaatctgataaggaatcgatatcacggaaatacacatcacactttctgcttgccgctttcttccaaaataaacccaaggattccccttttccaccaccaccttaatttagataaccaagataaatgagaaggttttcgcacttgatggtgggatttcttatcaaggctattgaatttggtttggcactgactaattttggtatccatgtgtttttagagtaagttgtagctagggtggtggggtgatggggagactctcactgaatggctctaaattcagtattttattctttaaccaagcagctgttcacacacatttcttaggaagtggctaaataaaaatatggcagccctggaatgaacagaaactgttgctctttcaaaaaccagcagctacaaatagtgatttttcttccacaaatacttgtttttctgtgacattctcattggttttattcagttaaactcccagaccatgttgatttttttttgccttttattttttgagctcataggtaaaaggagttgaagtgattttattttctgtttttgtcttttttttttaagtttttgtagagacaggggtcttgctatgttgcccaggctggtcttgaactcccgggcctcaggcaatcctcctgcctcagcctcccaaagtgtacccagtctcaagtttttttcacattatatatttgtgttctttctgtttttaactaatggtctccattatttaggctatattaaaataacaataaaaacagagcagatacaacagaattcatttggttggccattggagctgtttttcctttttctttttaaactgactttatttttttggagcagttttaggttcagagcataattgagaggaaggcacagaaatttcccatgtatttcccccacacaggcacagcctccctcatcatcagcatcccccaccagagtggtatgtttgttacagttgatgagccgacattgacacatcatcacctaaagtccatagtttacactagggttctctcttggtgttgtacatgctgtgggtttggacaaatgtataatgacatgtattcactattatggtgtcatacagaataatttcactgccctaaaaatcctctgtgcttcatctgttcatccctaccatgcccctaaaccctggcaaccactcatccttttactgatttttacagttctgcctcttctgggatatcatgaagctggtggaataatgcagtgtgtagccttttcatagtggcttcttttacttagtaatatgcatttaaggttcctccgtgcctcttcatggcctgatagctcatttctttttagtgctgggataatattccactgtctggaaatgccaccgcttagttagtcattcatctactgaaggacagctgggttttggcaattatgaataaagctgctatgagctttttaaaaaatagtttaaatgacatatcaatactttaatatttaaaatatctcagtgatcatatagcctcagaaagcacagttttctgagctgggtgtcatgttgagtggtgttagagtgccgtgctgcgtgctcaggtgctatgctgtgaggaaggatgataggagcagattctgtataagcagatgcacaaccacccacagctgcactttggcacccagggcagacaaataaaaagggggcaagatttttttaggggagattcctggcagatagagattttcttcagaatgtacagatttatttttggggggtggttaggggcgacagttgttttaagcagagttttgaaggagtttggtttggtgagtgaaacagtatttcatttttgattgcctttgtttttccagcaagaaagctactcctggtctgtgggcacacaccaaaaggctttgggcaagacagagggagcttgtgtgtgcccccagaccggagtcataccacagttgtcagatcactttgcggcagaccttccgacagtctcctcatctctcttgtggaatttgagtttgacccacaggtagcattttttattttggtggtaccctgatgtttataaggaacctcaggacactattagttaggaaggagattgtcccatgcaattcagccttgcaagagcttcctggttgatctagggacaaggtgtctatcactcagccctccaggtcttttcttcctaaagcaggctttggagcaaagcctgaccggtctttgcctatgactgagtttcccagggctgctgtaccaaactactaccagttcaacttaaaacagcagacatttatcctctcacagttttggaggccgcttcaaagtaggtgtcactgaactgaagtcaggatgtccgcagggctgcgctccctccagagcctctaggaacacatctgccccttgcttcctccagcttctgggggctgccagcgggctccagcctctgccgctggggctgccttgcctcctctgctgtgtcagatctccttctgcatctctcttacaaggacacttgtgggccgggcgcggtggctcacgcctgtaatcccaacactttgggaggctgaggcaggtggatcacctgaggtcaggagtttgagaccagcctggccaacatggtgaaaccctgtctctactaaaaatacaaaaattagccgggcgtggtggtacgcacctataattccagctattcgggaggctgaggcaggagaactgcttgaacctgggaggtggaggttgcggtgagctgagatcgtgccactgcactccagcctgggcaatagggcaagactctgtctcaaaaaaagaaaaaaagttaaacgagtgtcttggcactcccctgtaatcccagctacttgggaggctgaggcacgagaattgcttgaacccaggaggtggaggttgcagtgagccgagatcacgccactgcactccaccctatgcaatagagtgagagtctgtctcaaaataaataaataaataaaaataaacaaggacacttgtgactgcatttagggcccagaacaatcccccatctgaggacctttcatttaatcacatctgcaaaggcattttcatgtaaggtaacattgaaaagtttcaggggtcaggacctaataaattttgtgggccagtattcagcctactgtcccctagttacaacaaggatggggcagcttatggacgagagtgtcaaaaaattcagattctgtcctacagggatcatcttaccctgcagctgagttgagtgattattgagaacatactacgtgttgatgctgttgcttagcactgtgggagatacagagatacataaaactctgcttgccctgaggttgcttgtggttttgttggaagagaagacgtgtgtgtaaaattagtcataagaaaaaggtcgtgtttgatcctgagagccagatagtggtacccagcagtgagcatccaagcccttatctcccaaataggagactttgtaggctgaaaactggcccacagatttattaggtcctgacccctggaacttgtcaatgttgccttacatgaaaatgcccctgcagatgtgattaaatgaagggtcccggtatggggggttgtcctggatgagctgagtgggccctaaacgcagtcacaagtgtccttttaagcccctgctgtgcctgttctcttggtaaatatctctgtgtgctggaacatttgaccagagagagatttcggtgatcatatccatatttgactgtttcctattccataatttgtcgctgtctccgagtcttttcccgggagccccctattacaagtgcacctttctgtgtttattcttccctgttgtgcttcgatgatcccttttttctattcttcagtggctttttctccagtaaaatagcagtttaaattcttgaagggaaacaattaaaaaataatgtctctgggttaacaagtatgattaccgtcatctaaatcagtgatactacatgagaataaaatcaaggagacttacatttacagtagatgaatctatgataatatgccctaccgttttgggtaatttaaatttatgctagttcactctgtctacatgcatgtcatatcttagtgtaaattatagaaatatccctataaaagaaaaaataatttttttctgtatatgttttaagggaacctgaatttctttgggttgtaatgcatgatacagatagtattctgggaatacctgatgttcagcttatccctggaaccctggttatcttagtaaaatatgcagcaacaatatagaagacaatcctgaattttccactgcacaattagggcttgattcaccgtatgacttgggcaaattacttaactttttgaaaccacacttttctgattttcaaagtatgactaataatggtttctgccttaggattattaagatgattaaatgaaataatgcatgtgcaacgtttagaacattgctttaaagtttgtcttttccttctctctccccttttttcctttaaaataaacaaacatgtttgagggctgggtgagttgatgggctccctttagtgcagcacttctaagtaatcactgttccctctggttcattccattgagcacatgatgacaaacatttctggggatatcatgtcaccttggatatagaacagtctcctaaattacattttatatgacaatgtctcactgtatttttgtcctcttgaattgcagcatagcatattatttcttccagcaaaaagcaaaattaaataaataagtgattaagttgctggctgtagctgatactgattcatgacatgactgaggattacttagccatcacattgaattgatgacagttgccttctaaatattatctttagtcacatccctcgaatgtttgcagtgactttcactcctcaactagaatatgcacgtttacatacacatgcgataaggctgaagaaggcttgtggctcagcacaatttggtcttgtatgcacagtaatcattctgaagtgtatgattctgttttattagaaattctcacttgaatttcaagagaataaaggaggattcctcctacacaaagctgctaattgtttgcacactgtgtgcatcccgcatgataagcgatttgagaaggtgccacatcagtgcctttatccaagtgtcacctcctgtctacagttcccttagcagggtgaagggagaaagatgcaaagactgagcttggctgaaacaaatgtatttttgtccccttgacttcttgaattgcagcagagcatatgaataacattgatatatttcttggctgctagacaacaacgtatttctttgacagattgacgcctgaaaagaaaaatacagtatgtactaatgaatcaaaacattttttagtacctttgtgtatactaaatgtattttagtttctatctggagctagttgccatttactgtgggtttgaaatgccctaagttatcttctatggatgggtagaatcaatttacccacacattgacagcttttacagataggtcctgtaacagatataattaagttaaatttcataaatagataggcagtctcctccccagtcctggtccctttgggagatgaattggggtgggggtaatggagagtttcaaaaaggctttccggtgtctttttttaaaaataaggttttaagagtttcatggtcagctgttctcagtttttctcaagatggtatccaaagtaaggctcaaatttatgatttatcttccaaatgcttaaatggtccatttatgatctgccagatgttacaatgactagctccccaaggaacgatcaagaatgtgccaatgtctgggcaagatttttatccagcaaaaagaaaaaaaccataagaattggaggttttactttgaaaagtaaaatcagccacatccatgacttaagagactgtacatattgtcatgggtaaggatttagatcttggctccactgcttactcacagtgtaccctggacgagttactaggcctttctgtgttttactatgctcttttgtaacacagggagagatagcatctatcttctaaggttgttgtgaggattaagtgaactaacttgtgcaaagctcttagaatagtgctgggcacagagtggtgagtgccttgtatatgctaatagttgttgatttatagcttaaaattaattgtgtgatgcaaataggagggttaccaccccaagcttaaatggaagttttgcagcactttgcactcttgaggatgtatctgggtttaatagtaccttccatctagtgcacaagtcttctcccaggctcatcctcccaaacacctctcagtgttatccccactttgcaaatgcagtagtagctgggctcacagaagttaaataactacaccaagtcaccatccaaaaaggttcagggccaggaatagagcgaaagacagaatacggagccatgctctttttgctgtctttctcagtgctcagttctcagaattactcaggaatgagagcagagaaactctgtataggccatgcctggagttttttgcacatggcagtcagagagtcccagctcagttcagtgcagtattaccgaattccagtatatgctgggctctgttaggtgcaaggggttccaggatgaatgagtctgtggcccagtggacaaggtttgcccctgtgtgcagctctgtctgctttactagatttgctcctcagattctaaattggaagtatgtgcatattgcttgatttacagattattagagaatttttttcagttaaactttgtccaaaatagacactaagggcaaaggaaactggtattattacagcagggtgtatctcataagctctgagaattgtacatgtataaagaatctttgaatcgccgagtcttagccccacgttttatacagcacagaaatacagcacagaaagtttaggtgatttcccttgggttccatagtgtgttagtcaccaggttcctttaactctctcagtactctttcctttaaactatggaagagctcaaatgattaaatcaataaaagaatgacaacttatagagctcatttacgtgtctgaatatatcagtttagcccagagtatctgaactcctgggccattgctattcactgaccccttctcctcctcgtgttctagtaaaattcagcccatgaatatagtcattagaagttgaattttaatgaaattgggcgctttgatcaatgggaaggttgaaagttatgtgggaatcatctatatagtttatagctgtgactatgtaggccagctcctaagtgccccctgcaatgtgtcactctctctggttttctttccagggaggtaccctgtagaataacagtctaatttacctctcagacatctgctgtctttcagaccttatgctagttttgtgcatatcttcatgattcctctaataatgcattggattataaactattatctccacttgagagacgctcagagaggctagggagcttactcagggtcagagggagtgcagctgaacagttctgccagggtccctgtgattgttggagcagcctgtgttttttcaagctgttgtctgtgaatcgtacggtagaaacatggtgcgtatttctgcagccttagttctagccattgaaatatcatggagttgaatgcagaatacccattaatgtttaggatgaccaagaaactgtgcccaggccccaagcccagctctgtcatcagaggtgagttaccactggtgccatgccctttgattccctacaggcgccctatggaggtgcccaccagtgtgcacttggaagtgtgatggaacgcatcacatccccttgttgcccctgccccggtgatagggggattcactaagaacttcagcatagtgagagaatgtaactgaagctcctgggttagtgctgcttggtatcccagttactttgtagatttcggaatcttttgtcgtctagcctgaggattactgttgatgacacaattttctttgggattataggcttcatgtttcatacaaccagcatatacgtaaatggcctcttcagtgtatcatgtatacacattggtgaatagcttcccactagataatgttttaaaggggaaaaaaagaagtcatttctaaaatcccaagagagtgtccccgttttgaggttagagcacgttttttagccttatttagtcttgcatcttgctccttatgctacctttcattgctttatgaaattattttttaagggatactttctaacattccatcccactttttttaaagctcgttcatatactttgtcctcacagaatagaacagggtttctcaaattgcacacactgaactctgcaacacaacagttccttcattggagaccagatgaattgaaccactggctttctgaaaataactgtatgctttccagttggccagccttggcagggacccactactactcctatttctcaacagtcaatttaaaatattgacagtagcttaataacattcaatagtaacttgcagcagcctttcatataccctgacatctgagatatgtaccagtttatgaaatagaacacgcagatggtcttagccccattttccagatgaggacccttgtccagggaaggattggtgcccatttagctagctctttcccagcaagcaacagtacccaaggctccatgccccaggcctgggaggacccctcccacggcgtacttcagatctccacctgtgactttgaacacatgcttcgaggtgatgtacttcttggagatagtgctttcctcatctcttctaccttgtagtcgtcagtagagggcatgcagtgcaacagaagtggatttcaggactgagactagggtgaggcaagagaggcatcagaatgcaaaagtgaagtagacacctgccgtcagcactgggcagccctgctcctggggccttacttgactcatcctggtgggttttccaaatggcagaggtgcacaaccacttcttgcaagcatgggcacttgaattgtagcccatgtacacagtgattcttggaaaaagtcatgagtaatgaatggaacttttctctcccaggttgatcttgtgttttgagacataaagagtcaaaggttggtgcctaggatgctcattcttattgtttttggtagtttgattgttgaaggcttttgacacgacattgaagtgaatatttggggcattttgctcctctgggcttttctctaaagcaccctcacatttcctctctcatgttcctgggctttcctggctttgatgctagccccactgtgtgttcccattaatagccctatgtagcctggctccttattctggaaactgtgtaacttttgctcttgatcttaaacacaactcagtcttgcaaggagctccgcctttggtctcagcttcttggggatttccctggcagccacatagtgaactatgtcacactctctgttttacccgttaataaggaaatactctggtacatggagctttgcttgctgatctttttctaagtactctgggggcaaaaggaaaagcagctagaggataaggatgtaactttcttcaaattaagccatcctgacccgtggtagagattagccactaagaaatagtggaaacaaataactgtttcactcttgagtgttagcatggaagagattctggttgaaatcctagtcctgccactttctggttacagaaacttacattacttttcttttgatgtttcaaggagataggagttaaagaaaaatgaacaccagattactagaacattcttatagagttgcccaaagatggaatggacaccttccagagtggaggggagggagtaggattggacagtagtcctcaactgggagcacttcttccccctgaccccacacctgcctcccagggacgtttgacagttttggattgcacaaaactgaggggtgagagttgctgctatatctagtgagcagaagccagagatgcttccaaataccttacgaagcataggacagccctcacggaaagaattatctagctccaaatgttaatgatgctgactttgagataccctagtcagaagtaacatttattggccaggggcagtggctcatacctgtaatctcagcactttgggaagccgaggtgggaggatcacttaagcccaggactttgagaccacctggacaagaccctgtctctacaaaaaaaaaaaaaaaaaattagcctgatgtggtagtacatgcctgtagtcttagctactcaggaggctgaagtgggaggattgcttggacccaggagtttgaggctacagtgagctatgtttgtgacactgcacttcagcctgggcaacataacaagactctgtctcaattaaaaaagaaagaaagaacatttgttgaatctaattttcccatgtaatatcaatgactgtgcaagataaagtggtttttatcctcactttggatgagattggcctttggtgattgagaaaccttcctttggttgttcagctacttctagatagacatgggattttaaactagccatctatatgtccaaaacccatccgctttccacaaacccattatgtagttagctccccatcactgatgatgttcaaagctaagcagggtgagcaaccacttgaaagaggggatggatgaggatacaagcctaagatgtatgttgcactaaatgacttttgaggtccctcctaaagatcacattctctggttctattttgaaatgggatttgtctttttagccccagtgttagagtggcagccagatatcccttggctatgaccagtgaaatccctgtgctttgtgcacctgtgaatcttactcctattaatatcccagccctatcaggccagagggctagggttccaaacaggggcagccagaaatgcaccatcttctgcatcccatctgcattccgggcccaggcagttatttttacctccatatgtaaatgggcccagcgatttctcatttaggagaacagcagaggcacaagtgaggagagctggagaaggaggggaacctatcatatactctgagattgcaatttagtatcagtttgctgatcagtgtcactccactagtttaataagtaattatagtttctcttttgtgaacaaggaaaacgggtagcttcacccagtggttgtcagccctggccaaaaattagaataagatagagggcttttaaatcacacctacaactgagcccctccaccagaaatttaattttctgaggtgaggcctgggtacagtgatttgagaactttgcagggattccagtgtctaagcagcctgggcacctctggttaatggcacacctcagtgctgcgcattctgctccagtacctgctggtgttactctgtcataaagagactagaaaaagagtgagttgggccctgtttctcagtgtgtcttcagtggattgtagggagaaggaggcccatactctctgcctaaacgagcacctgctagactccgaaatctagttaatggaagtttctcctcatccttggacatccttgttttatatggtatacgttcaaaatacatataatctttggtttaatttgttttacaaagttttgaagttttcctctccacacttttctcatcaagctggtgtgtggaaagaaggaatttttcttttccattgctgtcatctaaaattgttgtgtcgggtggggaggggagggagccgggagacttagctttaactacttagaagttttcagggaaatgtttttataacaacctagttaatagtttgactttatgatagattctgttccttcattattttgtcctccagtggcttttatacccagcaaagtggaccatggtgtatgattcaagaagggtgaggagtatgtctttctttggaaaggcagggatggagggttgtgatttagaaagggtaagcaggaaaggagagccacagaaggcaagcactgttctcatgccagatcggtttcaaggaagaggacatatggaaggatctagaaaatgatttctctagaattgtccatgtccaagtcccctggaatgtctttgtatatccccagagctgtgcatgctccagtttgaagagctctgctttaaaagatatcaggggtgggggagatgaggggggtgaagtaaaagaataaaaactattcaattccatttgttttctctttcaagctcatacgttactcatttcatttttatattaaaatatagatgaggaaggaagggcacatggcaagatttggcaagcataatccatgaggggatatggagttggggatggcagcatagcatactaggatttttgaggagggattcggggagcctgttcatgttttccttacaactctggtacatgaagtacaggttctgcatcatgatggaagactgcctgggttcatgtttgggccactacctactagctctatgactttgggcaagtttctttcttcttttttttttttgaaatggaattttgctcttgtcacccaggctggagtgcaatggtgcaatctcagctcactgtaacctctgccttttgggttcaagcaattctcctgcctcagcctcccaagtagctgagattacaggcaaccgccaccacgcccggctaatttttgtatttttagtactttagtacagaccgggtttcaccatgttggccaggctgttctcgaactcctgacctcaggtgattcacccacctcagcttcccaaagtgctgggattacaggcgtgagccaccatgcccaggcaagtttcttaacctccttatagcagtgtttggcacatgatagatgagctacaggttggcttgttattccttgcaatcctgagtttctccccagagtaaagctggagcttttcccccagccaactttggtggagtccactgggcagagatgtgatttcagccaaaatatggctaaaggaggaaaggatctgagacagccaggtggaaatggctccccgggagagcctctgaccgacccgcacactgggaggagtgcgcactggggtggagccttgggaagttggagccatttgcagcagggaggagcctggcccctcgtcttcttggatggtacctaggattcagtctgcgaggcaggaagcacactagcaggactccagcttggtggagagttcctgctttcctttttttcctttttgtccaataaatcccatttttctcaccctttaaattgtgagcctaatttttcgtagtcatgtgacaaggacccctcttaagctgaactaaggaaaagtcctgcagcagatctaactagaatgccaatgcctacattgaggctgtttaatggagagtttatgaaaagttagctagtgtccttgtgtaaacctgtatgactctagttcagagtcttcagtaattgcaattcaagaataaaaccacacggcacttccattcccgtgtaatttgttgttgctggcttgtgacattctacatatcccaactatgagacagccaggcagtgggatggactgtgaggttcagatgcccggagatatgtgaggaagagcttttagcaataaatatgaaaatgaaatcaaagtaaaaactggcattgaacccctggtgtacttaggcttacttttacccaaatccaaatcatttcttgacactgcatggttaccaagagtgtctgtcattcaatatttcagattaagatctgttctttggtagctaagttcagagaaaaaaatataggatctagaagtatcattgctattttttccttgatacatttagtctggtattaaaattgcttgcagaagatttgattttaaaaaagtagaaaagagacacttatcctggtaaaattatcctgaaatcttaagaaattaagacaaattgcaccataaaaccagaagcacaaaattaaacaatattatattaagagaacccagtgacacattttccttctaaattaactttaaaattaacttttaaattaagttcaatctcatatcagtttgctttgtaagaaatagaatatatgtacatgtttgccttatttttagcatgttatattcattaaaatgttttagtttattcagcagatacatttagcatttctttcacaagaaagacagtgaaggaacaattaataacaggaccccagtaatacctggggggtttctacatctgcattttttgcaaaaatagaatagccttctaagaagctgtcagtggcatttgtgcagctggacagctttgcagcagatgtaacagtaactgtgatgccaggctgtgccccagaacctgtaagcatgacaagctctggcttcttccctcctctgaaaaggtacaacattgaagaggcagtcgtttcccctagatctgtaaccaagcacatctgggtgaaaggggaagacatctcttcacagagaggagaataaaggcggtgaccatcagggtgacaggcagcatggactgttgccacctgtgctgcaggcagcttcagtgcctggatggtgggacagctggtcctgcactcagcacgagtctcaggcagtggtctggccgcgcctcccttgggctgcttcttcctccaccgtcctccacttttgctttgtgtctgcgtcaagtcagtaacgttggtctgcagctcccatccctcctgatgggcactgcactgaggccttagtgggcattacctgatgccctcatcacccagtgtacaaacacctgctgacaagaagcgtccctgagcggaacccttctgctgggacaccgcaccttccgtgtcctgagtgggctgcaccctcgtggtgctcaactgggtgacttcacgctgtcctcagcgctgtcctcggcgctctctctccagtcagctctcctgctcaggcacctttttgggacacagtccttgccagttattccctgtttaatgtcctcatgtgtcttcacttgccctgggagactgtcgtcttgagagagcaagccatatgggaccctgaggcctggcctcagtttccctcccccccactgccccacggggccacgcctcatcagtggcatggaccttttagtcagcgagccctcagccggatgctcccgtgctggccactcctgtcatccctgctctgtcctccctgcaaactcctccctcaggaccctgcttgaagttacgtcctgcacagtcatccctggccttccctcagcagaatctgtcactccctcaaggtgtccctgcagtattctgctcatgcccctgctacgtggcagaactctgttgtcctatcctgtccagagctccaaagcccccagaccctgtggctgctgagcacttgaaccatggacagtccaggtgaggatgtgcggggagagatgcctcctgcctgtggctgagccctgcctgaaggagctgatgaggaaaagctcctaagcacaacagtgctgctcacctgggcatctagttggcagagtcctatcccagtgttcgcacccccagtttcctgggtcttaagttcagattatcaagtgctcctcctgcaaaaaaaaaaaaaatggtgattcttgtggcccttagttgaccccgcacctgggatatgcttatatttggtgtggggcagagaactgagtgttcttgaaccacttccacccaaccagagggaggtggggacatcaggtacacctcatcccctgatgtcacagccaagtacctggagccaccaggactccctctgagcccacaaaggagtgtcttctcaccaccccgattatactggtctagttatgctttggagttaaagccaggctgctattgcagggctgctgcaatccttgcaagcacagttgttctttgcttgcgcttgctctcgctctcgctctcactctcactcttgctcgctctctttctctctctctgacttcagtttaactttttaaacttcagtaataagtgttcctcaaaatagatggtcttcctggttgtaggtacagccagcagggttgagttctgctgccttccagcatggttttcctggggcctgtaaaagtcctgcaaatttgctctgacactctgttgacatggaggtcctgtttgttgttataaataaggaccagtgtctctaggacacaccttactgtgtataactgaatggcagattttgtcccttacttcttaaaaattaaatggcagaggagctggccatgtaaaagccctgtgtgtgtttaccaaaaagtacttgaattttgtttgggttttgtgttctggtgcatatgaagtgaattttggtaggagtatgtgcattcagagaatatgtcatcacacttttttctttatttgagtgccacttggctcttatttgattaaggtaatttcagtgacatattttgaagcaattcaccttgaaaggcagaggcaccacccaggtgcagaaaccttccttgggttatgcaacgcccagcgtgggtggaaccgcactcacactttacctcttcctgaaccacagccctgctctgattgcatgatggaagctgaggtgcctgacaagtggaaggaggaaaaggaacattctgccttccttttctctgtaatgccaaagctggcgtcatgcattactgagggcctctgtcagcactggggccggccagtggcacagctgatggggtagctgcactcgctagtcctctgggaaagcccaggttgtttttctggcttagtgttagaggcagctgtgatgtttacctcgatctgtaacatacaaagatctgatcatatgctgtctttgcttacattctattattgtctgacttatgttctaaattctctacaattcccttccatttgtcttaagaaactctaaacctttttttttttggaaatcactacttaatgattttgaggatggaaccccagacagttggtaatagtggatggttttccttttctgtagttgagtggctttctaattcttttgatggcacacaaaaagaaattaaccttagatcacaacttagtacacacatttatgtatgcatgtaactgagatgagttcctcaaaatagcacatacctgtgttttatgtgaggcactgatattttctgttctatattatgcttaactttaaaaaatacttcctgtgtaccatttgtgggactgtaactcacaacttaaaaaatattaccttgatacatagctccagaaatacacatgggtcattttaccaagaatcaccagtgcttttgctctgttaccccggctggagtttggtggcacgatcatagctccttgcaccctcaaccccctgggctcccagctgggggtctttaggaccccagcgtgacctgtgggtagcccttacttcctttaatacttttcttctgcacagtcaggtgctctccctttgagcttccgtgtgaagttcactgtgcacccagctctgctaccaccgcctctgtcttgaaaggaatagggtggggtggtcattggtgtatagtaagattcgaatcacatccttcaagtacagttctaccctaaagataagagtccctgtggtttttgttgttgttgttgttgttgttgtttgaatggatgtgttctttgagaaattgagtcttgagtattttgtgaggacatctaagcctggcgtccacgtcagtgctgacagatttgacctagtgtgcactcccatctggggaaatgcccataggctataatctctttcactggagcgattataatagcccccgggcttcaggtcccagtggcatccacccttggtggcagcatacccctctgcatgaacagggcgcccacttgtcccctccttcttacttagtagtgatttttaaatgggagggtggcagtcctgaatgtagttcatcagtatttaccgcacaagctctaaaggacacagtgttttatttgtgtatttatttaacttttccaatatcggaatatgaatttttgtttcacctgataggacacgtttcaggggctccattctacattgtcatttcacaggaaaaatatttgatggctcattagaagggaacatctattattttgttactgaaaggcacattttcaaccttgagaattggatggcaggtaatggcatggaaattgacagcattttaccacttaaaaataaccacaagaaataccaatgttcaccgaatgagttgaagttaatttggttttgtaggctattgtagttaacttgatgcttgatggaaataattttgtattggaaatcattaaaaattgatttgattaatgcttttataatgttggtatgaggtgttgcactgtggtggtgatgacctaagggtgctgtgatggcctcaaacgttgtccctccggggcccacaggcaggatcccacacactagcacacctcccagttcctcttaccatcaaacagaggtgttccttcaacatgcctgctcctccctgtggcataaaggcaccaggaggttctctgatcccctgttagatctcctctgcagggttgaagacattttttgtttgtttgtttgtttgtttttgagatggagtcttgccctgtctcccagactggagtgcaagtgacatgatctcaactcactgcaacctccgcctcccgggttcaagcgattctcctgcctcaacctcccaagtagctgggactacaggcatgagccaccaagcccagctaattttgtgtttttagtagagatgggatttcgccatattggccggggtgatctcgaactcctgacctcaagtgatctgcccgcctcagccttccaaagtgcttagattacaggcgtgagccaccgtacctggccatttttgtttttaatcggtgtagtgtccctaacctaaatatttcacatggcctgaactttctgtagttttagcagcaatgggatgctttgaaacctagatctctcaccaactacatcttccattgactggtgaaacactagtttaagccaattcattttgaccatgtgcatttttgtgcttgatccctattttatttcaaaaataatttccatctctattcatgtaaactaataagagccttccgtttcctttaatggcaaattgtctcatcttttactgttttaaaacatttttttaacatcatgagaaaacgtgataaaaggtataagtgtagtttcctggcttttgcagtacctcagggaattcggtaaactgtattccatttgaggaaaggaacggttggagtaggaggtagtgtaaagataacatagcaaataagcattttaccagaaccctctgaagtctcatcagactgtgccatcatcagaatccctcccttctcatctacaccgtttaaagccagcatccagtcagaagcccagagctggtaccgccttgctttcctgccagttgctgacatatggcacacagtgtcagttaagggcacaggctgatgggcagcttggccacatacctctctggcttcctatctgtaaaatgggcacaatcattgtacctgcctctgaaggttgttgcgagaactagacgcagccttggcacagagcccacagagagtgagcactgtgtaaagactggctgccagccattagtactgggtgcctgtcttttggtgtctgggcaaagctttaacctgttttatcagtttagaactcagatgtctccctggcaaaacaacacgggcatatagatattttgtgaagttttgttgaagtgcacttaggttaatgattcatgggcagcctttcaaagctatcaggctgtgaaacagctttgaataagattgtcttgtccttctgctgattgtcttttccttcccacattagcagccatagcaggaggaggagaggtggcaagtggccacactactctgctcacattaagcagacaatttatggtcaatattcagtgaatttcttttttttatagtacagttaactgatatttatattagctttaaaattatagcaaaatcaggccaggcatggtgactcacacctgtaatcctagcactttgggaggtcgaggagggcagatcgttggaggtcagatgttcgagaccagcctggccaacgtggtgaaaccccatctctgctaaaaatacaaaaattagctgggcgtggtggtgtgtgcctgtagtcccaattactcagtaggctgaggcaggagaatcgctttaacccaggaggcggaggttgcagtgagctgagattgcaccactgtactccagcctgggcgacagagcaagagactctgtctcaaaaaaaaaaaaaaatagtgaaatcagccaaatagagaactaacaggcacactgcctaattccttgtgtaactgtcattggtgtgagtcactggggcagcgtgattaggtctgtgagctggatagcaaggctgtcattattctcaaggccttctgctgactgctgctcttggtaagacatacagaatctgtgggcacctcctcttaccgctctatgctagatgaggcgtctccacgttgagttgtagtagatacagctaagaaagtaaaagaaatgaaaatctcatcaaaaggattggggctagtctcattcttcatgcatacccaaaccgtggtaactttgatttttttattatccagaatggattgtttagaggagacagatggctttccagttcatcaaattttttcaattatctaaaaggaattcctacgcttggagcaagtcatttcaataaatctcattcatatttacctgctgcttccttttaaatggaagaagagaatgtttttcaagtacacttgaaaaatagcatatgtgaattagaaacttcctctgtaaactagcagagtagaaataagaggccaggattcagcaccaggtaggctggattccttcttaggtggctcaagctggctatggggctggtctcatcatatctaaagaactgcccagcttttacgcattttgaatgtggtggaaccagctgcatctttttatatgagagcggcaaatagtcattgtgttccagtttgcttctcgggtcatctaaacatcagaggccatgccacaagcaccgtaactgagggatatagtgtgactgtggtccaggccagtgacctctggagctgaatcatgacttcccagatgactcccagagcctgagaggggactggtgcgtggctccaaatgattttcacctgggcctctttgaagtcgggagagatacgtgcagtatggtagatgtggagagggagaggcatggtgtgtccaaaaattagcaggacctgatccatatacgtggactctgaagcagtgcacttactagattaaaaaaaaaacaatgtacttactggatttaaaaagtgtgtatttttttgtgagatgcagtttgtaagatgcattggtaactaggccatatactttttccattggctctcagctctcaagaagctctttagtttttagcattggatcagtaaacacttattaaaatgttcccagcatttgtttgccatcttctctttcagctgggcccagctgtgccctcaaaccctgcctgtctcttccctgactgatcatgttctcccagcttctacagaggcttccatagcattgtgcttggtagcagacaccagacagaatctcagccagctcagtccaggcgcacgggctcctggtctcccggggtgtggttactcgtgtctcctcggggccttccgccctccacattccagtgccaggccctggacctttgtctctattcatgataaaacatttttaggaaatgctgacgctcagtgaagaaatggaaacactaactctttgttctcttcctaacagacacgagacgacttcctgggccaggtggacgtgccccttagtcaccttccggtaaggacagtctcatgtttgatgcttcgtgctgggggcgggggtttctaattgtttgtagtcagtgtattttcagagtggcatttcttcaccacggtgaagaaggctgaaatgaagcacgtgtgctgtggccttagtcctttctggaaagtggtcctttcaaggggatggaggagaagctggctgtaagagtagtcaagggtgcctgagtcgtgcgcttgcgttcccatccaccagctccctctcttttctgcacttcagctgctccacctttgtgtatcacatcttacaaaacagacacctccttcactcaggcctcccttcttgtcacttactgtctctgcttcctaatgcatcctccgggtcccatcagatgtttgcactctttgtctggaaccgcacatgccatttctcttggattcctgtacacaaactataatagcatttcccagattttggtgtctggctttctcagtcagcatggtgacaaaagaagagcctgttcattctgagtgaacttgtcagctgggaacacccaccctcgctggaacacgcactgagttagcatgtgtggtgctgccatttctctctgctcaaagtagcggagcagtcgaggctgttgactagtgacgggcattagggctgacacccgaaacaggaggcagggcagacagaatgtgtaggtaggacctggaggccttgagaaaggtggatccccatctcctattccagcttcagttttccggcttgtcccagccttcctcctggccttcttccctgggcagcacaacgacgtgatagaagtagcagctgagagaggaaaggcgaatgtttctgccttacaagggcattgtgttatttttttaaatgctttgtgtgagcaaatagcataaatagtctataaagtaaagtgactttactttatttactttatttaaagctatttaaagctagcataagcttcctgctgtgtggaaattatggctgtttccatatgttaaataccaagtaagctttgaagatgtgttgtgaaggaaggtgatagcaagtaatttactcttactcactcaggggagctgttaaggaagaaagtcgcaaggttccaaaggactggaagtgaaagtgatattcttaaaatatcttgtttgtttctttttaaaactctgaagctccagggtgccacgggaggggcctgcccagggcttctgcgtgagaactactccatgagccatcagaaacctgactgctcttctcaggtcacgttgggaggatgtgactatttcaccttttgtgagcaaagacctcgcatccttctacgttgggaggtcttctgtgtatgttcttcagactgaagctgcgatcctctcacacttttagacagtgttggttgatgggccagctcttttatggacgtctccagccaccctttccctaatgtaaaaaccacatcttggccaggggaaattattttctgagaggcaaatattctaatatttggtaagaggcaaaagtgacatgtttaaaaaccttgctctgacaagctcttttttgagtgagtgagcagcacctggtcttgaaaggttgagtagggctcccagaaaatagaaaaaggttcctcctccgaggccaagtcagtataaagaatagtttagctttggattctgagtggaggcagggtcagtgagccttcaaagaaggaagcggtgcagaggcacagggcaggaatagaagccagccgattgcagagggtagagccgtgaacgcccagagaggaccgagtgcccctagttactcgtgtgcccagagggtaacttgcagtggcgtgcttcacctccatacttcaaactgactagctgttcacagccaactatagtcagagagatggaccacaaagaaaacaaaaggagaggcgtgaaggtatattctttattcatgtggcagtagaacccaagttgcgtgttctgaatgcacgtggcttttgaatccaggatttcaggtgctttcgtgtgtatgtttggtcgtgtgtataggatgctcatggggaaattacagtggcattctgtttgtgtgatagcacacaggtatgagtgtggagagggcgggagcatatgcgtgtattttgtggatcgaattatggatgctgtgttcttgattagtatatgaccattgtcaaggtggattattaacagtctgtagattcaaaatttgtcaaaaccaccaagctttagataaaaggaaatagaccaggcacagtggctcatgcctgtaaccccagcacttttggaggccgaggcaggaggatcgcttgagtccaggagttaaagaccagccttggcaacatggcaagaccctgtctctatagagaaacttaaagattaacccagcatggtggcacatgcctgttgcctcaactgtttagaaggctgaggtgggaggatcgcttgagcatgggaggtcattactacgctgagccgtggttgtaccactgcgctccagccttggagacagagcaagctctccttttgcttttacattcagagaccaagagcaaacttagctgtaactgtaccatcattgacttttcaactgccgttttcacatttgtctgttaaattcagtgcatcgttgtctaaaaattcatatgatatttgataacttgaatctattaattatttagcgataaagagaactctgagatctgtattaacagagtgagatttctggcaggtgtctgcctgttgcaccttcctcttgacttgtcagctctgtctccccttcccctggagccctcagtaacccacctttgcccagccacaaaatctcttcgtccctgggaaaggcagtggggcagagagagctattttaaaacattaagttttcctaaatcccagtcatgtgccacttaagacaaccatggctgactctggaatttaaattttcctagatgaggcattttcagggtggtggtattatttgatgccctgcctgtacttggaggtagctcagctgaccaacatccttttaccccttttgtgtttatggctgatggctggtagcaggtagcaggctgatggttccctctcatgagtgcagaattcaaaatcatggagtttggagggacttcagagacactgattcactcccagtattttccaggtgaaaaagcctgggcccagagagggaggggacttgcccagcaataagcaggtcattggtggtgctggatctgaccctggctctccagcatcattgtgagcctgtgatgtggtcaagggtgtgggcatggggtggattcgcccaaggcttaggtgcttgcagtggttgcatacaagtttcgagtctagggacccagcagggccctctccttccatttgcctgcagaatcctttatctcactctattccatagtgaatgcacctaggctgaaagcaactactctctttcaagatgaaagtactgagtatccagattttcttctgaatgcttttaccctggaacgggggcagcattgtggctattgtggctaatagcactgtttgcagcagtgtgtttaagatggctttccaccaggagcaccctcaaagccatcctgggaggctccactcagctctgctccagggaacaggatcagattggaacctggatgaatgccaagaagaatcttgtagttatctataagatcatcttctaattcaggctagagaatttcaatgaacgtgaactttgattttaatgccctacctgttactgcttggcattgagttggcagtactgacaaatgatatgaacgtgtagaattggccaatgaacatggctagtgtttgttgagtgtgccaggtgcccttgagaactttatagaaaccaactcagttgattggtttgatcctcacaacagccctgtaagttatggttactgccccattttatagatgaggacactgaggccaagagagataaggaacttgcccttagccacttggctctgtaagtaacaaagccaggatgcaaacctaggagatctgccttttgacctgtgtgatatcagtcatttaagctgcatagggtatggacagactcaggttcagagtccctctaagctccgtggttttccctcttcactctcttgcatgttctctgctgctcctagattgctcatgcccactggtgatcctgtaggctttgtcatactgtttgatttcctatgtttaaactgtcctttctccctgttctctacctctcaaagccttcccatcaccctgtattgtattgaactccacatccaaaaccattttgatttccaagtcagagtccgtctgttccctgtaccccaagtctcacagaatgtaacctctctgtgtcagtgaatttgttctgccttagcttctagtggattgttgacatgatggctcttcccttgtaattgtaaccataaggactgctataccatgttgtatccacatgtcgttgacataatattgctctcaaattatttgttggttggcagggcatggtggcttatacctgtaatcccagcactttgggaggccaaggcaggaggacgtcttgagctcaggagtttgagaccagcctgggcaacataggaagacccccatgtctataaaaaataaaaatattagccaggcatagtggcacacacctgtggtcccagctacttgggaggctgaggtgggaggatcacttgagcccaggaagttgaggctgcagtgagctatgattgtgcccctatactccagcctggacagcagaagaccctgtctctaaattaaataaataaatgttggtttaataaatgaaaaaaggaaggaaaaccagcaatagttttcttaataaattatccatttatttccttatatatatttacaaaccttttggtagaaaatattttcaaaatgtatgtttattactgcctcataagaacagtctagaaaatataatttacttcattcaatgatagtgaattttgagagcctccatagtttactacagatcagatgaattgagtgcttacgtgagtacctacttggtgccaggcaatgttcttggcaccggtgatccaatggtgagcaaattcaagtctctgttctcatgggcttacattctggaagtgatggataataaactagtatgtcaacaaatgaacaggtactttcagaaagtgatatgaggaagatacagcaggacgataggatggggggtgataagggtggctgatggtgggaactctaaaggatgagacctgggatctcacacttggatggcaaagtggaaacagccatgccatccagagtcagctgtccagcagagggacctgcctgtgcatgggccctactgcagtacatataatctgcatccatggcagatgaggacaggatggttgggagtacaaggaaggaagagagagactggttcccaatgaggttaaagttgattcaaggccagattatagttggtcttctaagtcataggaaagaattttcagtttattatgagaggagtaggaacccattgagagtttaaagcagagaatgacataaacagataacatttcaaatagcagtgcatacgtacatacatgtgtgtgcatgcacgcgcacacaaacctgatacagtaaatcactggactggtttatctcttgctataaaagtatttgaaattgtgtttaattgaagggtctaggtatttgaggttttactgaatatatagtatttaaagattaatgaaatagtcacacttatttatccaatttcctgctttggtaggaacttcacaatgaacttcacacaatcaaatgaacactgatttctttaaaaatgaacaaatactccacttgtactcatagcttcatgaactgaacctcagcagaaggttgatcggtgctgcttcctggggtgatctctgtgcaggagatagtctttcaattctcttaggctgatgttgtgagattttaatacaaaaaacaaagtttccctcaaagattaaatcttgtatattcttctgtttactccacccatatgtgtctcgagtcacaggcatatagcaaggcactggtgaccgctggttctccgaagtgaatcagctctgtgagactgaggccacaccctgcagttagaaattttacttggcaatgacagctgtaattttgtcatttgtctgtggctggggctggctcctaaaacccggtgtggatagtgacatctagtggatctctagtagatcagttccgtggactgtcaggtaccaagtgaagaaacacattcagcggtgccacattctaaaattcaaaatatattctctgtaatccagttgcctgtatctaaaacatgaaattattaggaatattaaaatttaatttactgttttttccccacagacagaagatccaaccatggagcgaccctatacatttaaggactttctcctcagaccaagaaggtgaggcttgtgggtatgggtgggtggggatgcctgccctgcatgctgtaggtataggtggggatgcctgccctgcgtgctgtggatatgggtgggtggggatgtctgccttgcttgctgtggtgtgggtgggtggggatgcctgccctgcatgctgtggggatgcctgccctgcgtgctgtgggtataggtggggatgcctgccttgcgtgctgtggatatgggtgggtggggatgcctgccttgcatgctgtgggtgtaggtggggatgcctgccttgcgtgctgtggatatgggtgggtggggaggcctgccttgcatgctgtgggtataggtggggatgcctgccttgcgtgctgtggatatgggtgggtggggatgcctgccctgcgtgccgtgggtgtgggtgggtggggatgcctgccctgcatgctgtgggtatgggtgggtggggatgcctgccctgcgtgccgtgggtgtgggtgggtggggatgcctgccctgcgtgctgtgggtataggtggggatgcctgccctgtgtgctgtgggtatgggtgggtggggatgcctgccctgtgtgctgtgggtatgggtgggtggggatgcctgccctgtgtgctgtgggtatgggtgggtggggatgcctgccctgcgtgctgtggtggttggcttttgctgaagacgattttaagtgtcctttgaagtcacaacccttctaaccaattttcttccattatgtgtgcagtcataagtctcgagttaagggatttttgcgattgaaaatggcctatatgccaaaaaatggaggtcaagatgaagaaaacagtgaccagagggatgacatggaggtacgtggagggcgtcaggcctctctccttgccttgagatcatattcatgttttgctttcaaactttataattgaaggaaataaaagtttagaaagcttaaatataaaaaaaagtacatatgtccgcaaattggtcattgatagtctaccagtgcagttatttgttttggttaaagatgaactttttatgttacaacaccaatcctcggagagatttctctttagacaatgccatgcctattccccaattttagccccacagctctgtgaaagtctcctcacacattgaatcctattattgctatggacttgcaactctttgtaaattctttttagccattgaggtcgcttcaaagtgggtggaggaatttagaaaatcacttttttttcaagtttcttactcatttggccacaggtgacagcctgcagtagaaaaaccctcctctagaaatgccattctgcaacgagctgaccagaggaatgtcccttttttccttcctgacagagccgcctgtatttaccttgtcacagactgatgctgtgggtcctatcgtaccttttcagcacacacctcggccagtgctgttttgttaggcaaattctcatattctcaaagtgtccattaaacgagacctctctagggcttattctcacatctgtttgcagctgttgcatatatgtgatatgtgaataatgtgtgtggagaagttacccgaacactcctccgcctgagagatcatatttccaggcattatttcatttacaagccttcatctctctatatacatgaagaggaataatgtgggtgatagaaatttatgaatgttaacatttcataagcatgtcaacagattttcatctcaaatccaaggaattttttacactcttcttgccttccaaccgcagtaaccagtgaattacttaattttccagtgattttagcagaggatgttaggaagggaatacgtaatgcctaaaatacgtgctgtaaaaatggaactcgaattttggtaccatgaaacccgttggtgtggacacagccagtgtagagggcctgagtagaaggcagcagcttccagactcctggctcctgcggttgtttgggatgcaaagaggaggcttctctctcaaagcccacctccctggggagcaacaggactctgggcctctggtcccctgtgccatgagttctgttagaacacaggtgcagcgcagctcatcttccctgctccctttacctcatagaggtgttgaaaagatggcagctgtactgtgacgcacatcattggcagggctttgtacagccttggaggccctccagtcaaaataacaaacatgacgtatggaaagagtatgatgtgacttaagtagtgtcaccgactgtgcagatccaaattgtgttgtcctgcaatgtagtcatcttagagggcagcacaattaattggccattactcagaagatttttgaggcctttctagaattgatatatatatatttttttggccttcatttgggaatttactcaaatgtggccccgaagccatggctagagccagagagccccagagcaaggagaagggcatgcagggcatgctgtgatgacctcttactcacagccgaagaaccaacctcataatcgtccctttaactttattccgcagcatggatgggaagttgttgactcaaatgactcggcttctcagcaccaagaggaacttcctcctcctcctctgcctcccgggtgggaagaaaaagtggacaatttaggccgaacttactatgtcaaccacaacaaccggaccactcagtggcacagaccaagcctgatgtgagtaccgtgtgatggtcaggaacacgtgcacgtgcactgcacagctagggacaaatatggcggccctttgggacaaggctgggaaataaatcatatgtctataagagcagatggtggtgtggtacgagattcctctccatttacgtaaagcatgcaagagcagtcagaacttgtatattgtaagcgattgcctttgagtcacatgctgctgttttcaatatgagctgatttattttctatgtcttcttttatgtcgattcctgaaatacaaagcagaggttgtttttcttagacttattttacatttgttgattatattgttttcttcttcacctttctctcccaactgacccagaacagaaccggcaagcaaattggctttgcaattttctgttttctctaagtttttggatgtttactctcttcaatgcattgatttggaaacctcaaaaatttttttttctttaaggaaatttgagccccttaatataatcagaaacacatgggagagttgcaaaatcagaattagtaattactgtgtattttaatccctcaccagcctcagggatgcagtaaaccaattcctgttttgttccctcagcaatttgtggtttgattgatagcaaataaacactggttaaaactcatggactttaaaaatggttttgtagcagcttgtttttaaatcattttatacagcaagatctaagtctattgataatacatcgaagggcaaaaagaaagtcttaaggaaaaggaattttatcctagaaattatgagctgcctagcagccaagacaaggaggaaattatcaatgaactatacaactttcagtatgtaataaaagcaagtctactgggtagtataattttcttgtctactcgaactctgaaagaaagtggctaatgatacattttagacaacaagcagtatgaggtatcatgttcttaaaaaccttttatctttagaaattgtaaagatactccacatatgactgtgggtggggagggtggccaagttttctggtctaggttttgtttaatttagagataaagcttgcagaatctggaacaacgaatagcctgtcttctctgagcccccaggtgggttctcgtgaatgtcagctgttcgtgatcagctttagactacccagcacgggcattagctcaggacagcaaaatggtctcaggacagcaaaaatatcagatcagctgggtaatgctgaactatcttttgttaaagttttttcccatggaaatagcttggttgattctttttgttttttatattattgcttactatttccttttgattaatgcccatagctattagaattattgtaatccattgtagctatttgtagtaaaaatgaatttggacccaccttgggcttggttacatgtagtgactagaagaatcttggtagcaatatcctaagcaaagcaccattacctacctttgctcaacagcatgagaaaggagtactgaaaaggtagatcctcatgcgacctctgcagaaaagtggccaggagcaactcacaaaggaaaaaatcctgatagctaatatgtatatggaaaaatattcaacttcataaataaggatcatgcagattagagtttgtattttggggacaaatagggataattgctactttctctgcctcacagagttgtgaaactaacgagggaattcttgagaaaacacttcatacattttaaaatatatactatttttttgatggctccacaggtgtagacatgtccccacactcatcaagaggtgtacgttaaacatgaacagctttttaatgtgttgattagacctcaataaagtgatttaaaagagaaaccatctttggtggcagtgtcccagaaactaaaacaaaaggtataacttgctggctcttcactagtctagagcaacaagggaaaaatgcagttctttttctgttgttgtttgagacagagtctcactctgtcacccacagtggcaccatctcggctcactgcaacctccgcctcccaggttcaagcgattctcctgccttggcctcctgagtagctgggattacaggcgcccgccgccatgcccagctaatgtttgtatttttgtgaagatggggtttcactggcttggtcaagctggtttcaaactcctgacctcaggtgatccgcccacctcagcctcccaaagtgctaggattacaggtatgacccaccacgcccggctgaaaaatgcagttcttaatccaagttcgggctcacatgtagttttgggagaaggcagaggcataactgccccatcaaggaggcagcaatgccaaagggagaggctgagccaggaaggacacagcagaacttggcagaacctgaggagcgcctccttccaatgggcataacttctagaaggcaagaggaaagttagttaaggaaaaagagtttccaccacaacctctgctagcaggccctttattgggatacagtataagttcatttcagaatgtgtgagaaaactttaaaatttgtgttttagaaagagtctataatgagtgttcttgataagtactatatttcagttagtctgaaatgacgatttcaacttttgagatactgacttgtgacataatttttgttaatgggatatgttatcttattgaaagtatctgtgagagttttccctgaaaaaatttttggcatttaaacttgtacactaaaagcctctgactagtatttcccccaaagtatgattgcctataatttactgcaaaaaaaaaagttttcttttttctttttttttttgttttgttttgttttgagatggagtctcactctgctgccctggctagagtacagtgacatgatctctcagctcactgcaacctctgcctcctgggctcaagtgattctcctgcctcagcctcctgagtagctgggactacaggcacgcatcaccacactcggctaatttttgtgtttttagtagaggcggggttttgccatgttggccaggtacgtcttgagctcctgacctcaagtgatccgcccgccttggcctcccaaagtgctgggattacaggcatgagccaccatgcccagcccaaaaaagtcttccaaattgaatcaaaacttttagatcctgaattgagaacatcacatgacaaaaaatagggtatgatgttttggtgttcttcagaccccggctgacttgagaggttatctcctgatgttattaggatttttaaagtagggtaaaggaggtaaatgcagtgtcacgattttgagattctgttaaaatgagctagaaagcagctgaaaaaaattcatgttggatcaggtgtactttcctccagatgacagctttgaatttgtcccttttgtagtctttggtcaaattgctggtgaccagaagtagctgccttgtcattgctggacttctagaaggattgggactgcccagctgctgtgtgaacttgcctgtcacctctgcttccagaggtctgacttgtcactgtggcaaatgggcagaggactttgatttctgttttttattaaacactgaggtatattttgaaatgtatgcctgaaagatgctcaaaatggtgtgactaatgcattttaaaactgcatttatttgattgaaatgaaccttaacctatactttagccgtaatatggtgggagaattctcacattggatgaccagctagttgtcagtgtttgacgctgacactttagtggccatctggccctccgtgagcattgaactgtcatgaagggcccgatctcaaccacttctcttcttctctttccccctttcctgcatgctcagggacgtgtcctcggagtcggacaataacatcagacagatcaaccaggaggcagcacaccggcgcttccgctcccgcaggcacatcagcgaagacttggagcccgagccctcggagggcggggatgtccccgaggtacgatgtccccagaatggtgcaaagcccggcagctccttcttcccatgttctccagcttgattttatatcataatttcttctgtcagtaaacattgttgagaatgtaaagattacagtgacgcagggaattaattaccatctgaatattaatttgaaagtgcctataaaagccgtatttgacaagtataggtggctctatattatagaaatgggaataacattatttttatttttattttttttgaagacagtgtcttgctctgtcgcccaggctagagtgcagtggtgcagtcttggctcactgcaacctccgcctcctgggttcgagcaattctcctgcctcagcctcctgagtagctgggattacaggcacgcatcaccacacccggccagtttttgtatttttagtagaaatggggtttcaccatgttggctaggatggtctcaatctcctgacctcgagatccgcctgctgcctcagcctcctaaagtgctggggttataggtgcatgccatcacaatggctaattttttttttttttttttttcctagtagagacgggtttcaccatgttggccaggctggtcttgaactcttgacctcatgatccacctgccttggcctcccaaagtgcttagattacaggcgtgagccactgtgtccagcccacattatttttcagtatgaaaatcttaagatatttttagtttgtaatttatttttcacaggggtctaaccatgtctcattaaatgacagcttgtttttatcatagttgagctgttgaatgagccctgtaacttgtttgggtatcatatgcatatttttattgagtcgctttgacacttggaagagatttattaccatgaaaatataaatttaggtgaacagaaatgtgtaattttccctttaaatagttatggtatgttacttaaaacgttatgaattaaacaacaaattagccataatcttccatgctatcttaccagctctgtttatgtactaaaaatccattcttcttagacattgtgttaggaagatcatttagaatgcggcgattcaacttggaaaagcaaaagtaatgattccataacacattcactctaagttattttataccattgtttaattacagcgtatagcttctatgctgctcccacggtgaatcctcagtggttaaaagtaaaagaaaatccatgacaattgtttataaactccagagaagtgtgtgtgtgtgtttgtttttttgcccacacatatagtaacaagtgctggaaatcagtcactgttcagagaggcattgttataaagtggttaagagcacagcctctgtctggaaccaggcctctttgattcacatcatggccctaccacttgctagatgttaccttgggcaggttattttctgtgcctcagtttcctcatctgttaattgggggagttatcttcctcgtgattattgtgaaggttgtgtgcctcatgagaggcacttagtaggtgttaattatagttatcaccggggctattgttgttacatggtttcattggggagctgggtggatccctacttctttctagtgtttaccccagtgtctccttctctgaaagccttgggagaccatttcagaggaagtgaatatcgctggagactctctcggtctggctctgcccccaccaccggcctccccaggatctcggaccagccctcaggagctgtcagaggaactaagcagaaggcttcagatcactccagactccaatggggaacagttcagctctttgattgtaagtagtggccttgtttgaaagaaaagctgagcaatgttttattgttttttgttgcttaaggagaatctcttacgtaaatagtgaccaagggtcttccagctcccagctaactctgacattttccaaagttcctccttccctaggagaagcaggactgtactaaaattagcccaagcaggtgagaatctttcttgatttggaaggcagctttgctcacccttataccactaacactttcttggtttataaagaactcaaagaagtaaaactccatgatgtctgtaattattagctttaaccttgtagaattcctttcccagccaaaaggctcatgaaaatagtacctttatcacaaaggtagtatttcacagtaacaattaaaagccatcaggcctaatcagtcctcttaagtcatattctgcaggatttatcattctcatttcgctgataagggcacaatgcttaagtggctcatccaagacaaggtttgagtgggagatagaagacgtctcctaagtcccagagtatgaacccttgagaaatgttgtgaaattgtgacactgtcatcaaggtagcattttaacttgggctctcaaccatcagaaacatactttctagaagcttcagatgggcccaatgcctgagcccaatggaatcagtcacaaagacttccatgtttgacaatacaaaactgtgcagaaataacccatagaaaatccctgcttgtgcatagaattaagagcaaatgaagtctcagtgtttctcaagaaactgaacttaaaaatgtacaatagtaaatgatgatagtcactccactgaaaatggcatcctaaaaaaaaatagtcattactatgaccataacaaacataaatgatagcactgcatacaatgtaaaagcaagtaagtactcacaaaattgttactttttggttatggtgtttttattttaaaagacagtatacgcctctattacatgagttgcatttatcattcagttaatgtgatttcactttgaaattctgtgactttttcaaaaagagatgtgtcgccaagatgaaaatgtagtactaaatggacaggataaaagaaattgcatatatatgggatatttgaactgataaaactgttgttatagaaacaacataaacaatgaagccttgtatttaaaacctataaaagcaaggaggtaccacagaatccatggcagtaacacacctttagtaaaccaagtaaacactgtaatttttttcagcaataatcataagttagcaattctaattatttaaatgaggagctcctgaatttaattattctagatctgtgaaatatcattaagacccaaatacaatgttgtattatttcacatcgtgttcactgttaaatgagagtcaaatcggatatttgctcattgggattaccctgtattcaaggggaagaacatgagctttggctgggcacggtggctaatgcttataatcccagcactttgagaggctgaagcaggcggatcacctgaggtcaggagttcaagaccagcctggccaacatggtgaaaccccgtctctactaaaaatgcaaaacttagccgggtgtggtggggtgcacctgtagttccagttactcaggaggccaaggcccaaaaatttcttgaacccaggaggcagaggttgcagtgagccacgattgcgccactgcactccagcctgagcaacagagtgacacttttattaaagactgattctttcacagtaaccaatgtgggaagatgtgaattgtcccccatccctaccacagagtcttcttgtaccatttacttatcacaaaatattaaaaatgagtaaatactagaaactgatactatggatgaacttgccgataaggagactctggcttctgtgtgtgacctgctgctaatcttcattcatatcaattaggcttcatttaaccacatagactaatacaaacaagttagaggaatattaagacactacacagtagatctttttttttagcttgatctcactatttttaatcattcctgtctttactacttgaagtccacttagaagctaaaattggctgagcatggaggctcacacctgtaatcccagtactttgggaggccgaggtgggtgaatcatctgaggtcaggaggtcgagaccagcctgaccaatatggtgaaaccccatctctactaaaaatacaaaaaattagccaagtgtggtggggggggcttgtagtcccagctactcaggaggctgagacaggagaatcactggaacctgggaggcagaggttgcagtgaactgagatcatgccactgcactccagcctgagcaatagaacaagactctatatttaaaaaaaaaaaaaaaaagcagctaaaattataaataccagatctttcagaagtaggccaagatgatgtctgagctcctctgaatataggatgcaactgactctttttcaattgtagtaatcaataaatgttgggtagccacatatcactatttcttccgtctattcacatcacattaaaatttaccctgagggtgcatcttagagcaaactacaagactgctagcttctttctgtttgtaaagcagcattagagtgttgcagagtcctgttgagtctcctttctgaaagttttggtctcctcttacttttgccactaattctaaggaccaatcaaaattccagtctgcttaactgaaaattaaagtgaaagataactttttcaaggatgactgtccttgctctgaaaagatgtttcatttaattaccttctaatatcgaagagcggtgaatatggttgagtgatatgtttgttaaaccaatgaaagttgcttttaagaatatatttcttgatgcttcctgtcttttcctctccttccagcaaagagaaccctcctcaaggttgaggtcatgcagtgtcaccgacgcagttgcagaacagggccatctaccaccggtaacccatgctaatttccagtcatcagttgactttttgggctttcatttacaatcatctgggctgctgcaaaaagagtttttcctgtgtaaatttatttacaatataaatgagatgtttttaaatttcctggccaattgccctaggaaagtggatttccaatacagagaattgttactgccacccatctctaaaatgctggaacctccattgctttagtttttcacccaaatttataccaattttgatttgctcacttaaacctcttggtacattagttagtaattccttttaccttattgagttactatagttatgctccagtgatctgtactttgaaaacacattgagtccctttaaccaggaagaactcttctgggcgaccgtccacatgttcctttcccttcctaatgacctgaagtctgaactctacagagcctctgtaccttctctttaaaggcagctctgctcaccaggaattggctataattctttccaactctctcatcattttaatagctatcagcaaatgtagaggtgtaggggattttgtaacatctgatgtatgtaaaaagaaatattcaagttggaaggcagactagaactgccctgagagatgtttgatgtacacattaaaaataagaaattttacataaatttgtttcttcttttggaggtgaaaatatgtggttttaatgtgttcaatttgatattttaccttgacagtttttgtctgttgctacaaaaccttgatcatttttaagactaataatgtattacgtatgaatttgaagggggaaaagtgcatttaaggtttttgaaatcacagtgtcttccctctcatgtatgttttttcttgacttcaaaggatattttggcctaggttttaattttttatgtttgagaaaaaattaatgagtatactagtcaaggaagcagtcaaaataatagagtcatttgtgacttacactggagagacttaataataagcttgataagagcgtcttttctgggatggtttcagtacagggctcccaaaaacaaaataatcaactgagatggactggtaggatccttctcaacctcatgatctgtgattttccttgaacgaatggcactttctctccttttcaaaatcaatgtcaattttatttcccaaagaactcactttcctggaaactggtgattcctccctctttctttgtactttctgatgctgtaaactcactgatcaccagtggcctcttgagttttgagtgtggggagatttcagaatctgctaattatttgacaatggcaggcaaaaccagaccagctttccatttttctctaaggcagctcactcttttgaggttgtcattgtttacccaggtcaaggatgagccaccttggggggcataggggtcacgcttcctttgtgctactggtcatcagcgactgctggctttgtctggatagggtgggtttcagggattctgatctcacgtcacctgccttacagcgctgccacagcagtgggccctgattcagacagcagggggtcatcccctaagtgcatttcactgatgtaaattatcattcacagcccagtgccccagctgggagagcgcgttcatcaactgtcacgggtggtgaggaaccaacggtaatgatccactttatcagacatcaatagcaagaggccgtgaggcagttttaatatttcgtgtagtggtgaatatacgctgtttttaaaaataagattagctcctttgtgctacagagctgcacacgtttcttattttaagcttctcatttggggattgtttaaaggtactgggtaaaatagaatgatttttttagtcccacataattttattaggaatactatcaggctttggttaagtgcatttaacttgaccatttagaagatatttttgacttttagtgtttgtactcctgataagtttttccatttcattagaatgcttggttaaagtaatttggttggaagatcatcaaagaagccacaggaattgcatgagactgtgtgtgtgattcctggatgtgcccagggcccttctcttttctgtatctcccctaccacatttttcacagggggttagacttttcttgtccccagaatgcaccatgaccctttctctgccaccaggggctctcctcacacaatgaacaagtttccgtaattccaagggaacataattaggatatataagtgatctagaaaaatttatgtttctctaagccaaccattcttattcattattttaaagaatgtatggtattcctgtctgtgggtgacttagatttgtattttaattgcctgttttctacttgatccctaaagttaggctagcttatagtttatgcttcgcactgcaatagctgtttaaagaatttcctggccgggcacggtggctcacgcctgtaatcccagcaccttgggaggctgaggcaggtggatcatgaggtcaggagatcgagaccatcctggctaacacagtgaaaccccgtctctactaaaagtacaaaaaattagccgggcgtggtggtgagcacctgtagtcccagctactcgggaggctgaggcaggagaatggcgtgaacccgggaggcagaggttgtggtgagctgagatcgcaccactgctctccaccctgggcgacagagcgagactccatctcaaaaaaaaaaaaagaatttccttattgtttcacctgtgttgtattttgctataactgctcattacttgtggataactttacgtatacaattgctgattttctaaagatgttgatgacttcaatttaatgctcagcattgtacagaggaaaatcaaactggcaacagtcagccccagaacactcagctcaggttaagatattgagctacagtggtttacatgagtcatgtgttgagtgaggcagcctccagtagaattcaagaaattctacatgaactattacccaccgtgcacttgtaatttctgtgggagtagtggagctttgagggggacaagatcgttttgtgagataattttagttgaattcagtgctgatgaacatcatctgtatatcacctatttttgtattttgttggccttgcaacctgcgtgtagctttggagtgttgtggtagctgatgtagtaaatgaagtaggaatggaatcattgcagtaccaggctccatggcaagggtcacctggcaggacaaggtgacccctctgaatgagatcccgggtggcacgttagactgccattttcttgccttcttgcctgcactctcccctccccgtcactgagtttcagcatgggttgggtgttttctttccacaggcttggcaatattcattcctaagtgtttcatctactttggtagatgtagatagatctccctacctacttaggtttgaaaggatcacatccatttctcttctgctgtatcctgcatgtttctcttccacatcctttgtcgtgaatgcccttgacttcctgtcttgcaattctgtctcttcaccccgtgtttccctctttggcatcccctctgttcctctgcacatcactcacactgaagtgtattgtcctgggctggagccatcatggtattatatcatctcactgcccctgtgctctcacagacatacggctgtgtacacataggtacacattgtgccactttattttattttttttaaatgggatgtcatgtatacattacttagcaacttggtttttttttaacttatgttcattcttctgggacatgttaataattacataatattcactgacgtaaaggcactacagtgttaatttcccgacattcaaggactttctgctccccctaccctgccctttcaactccatacgctgtgctgaagtaaccgtcctgatatagctttctttctatgatagtgctttcattcctgtagtctaataaacaggccctgattctcagccaagaaaccacagccctttgatttatggcaaataaacgcacagtggtgtcactttctggcagactaagccagggccctccccatgagataaaaggagagggatagcacagtcctttcagtctttgttgtatatattctaaaaatacacgagccaccattactgggttggtgcaagtcttggcaaatctgtgatggtcagtgtcaaagtggttatttttaaaagcatattgaaacttctgcagtttacaatcgtgttctttattttaatgaaagaaacagagccactaggaagttctagctaatggcttttgggcatcacaaagcagtagtgtattcagtctatgatgaaaagctgtgaaatgttaaactaagtcgccatttctaactggtttgattacttttttgttaagctagggtggaacatgctcacaagcacagaacagcagaaggctggttttggcttcctggcgggcccttccatggcctgtctgtagaagctgagtcctgccccctcaactagccgtgcagggtgggaggcagtgtgagttacaaatggaatcatcagcacaagttgttctatgtggtcatttggagagaacactgtaaagaaacatttccaaattgccctctcacataaatgtaactaaattacaggttgccagttcagttctcaatagaagagagaatgagcattttaatcaaattcagcgttctgtactacactcctaattttccacaaactgattagtgctattcactgtggctgtatgaaagtaacctgtatggccaggtgcagtggctcacactggtaatcccagcactttgggaggctgaagcgggtggatcaattgaagtcagcagttcgagaccagcctgaccaacgtggtgaaaccctgcctctactaaaaatacaaaaattagctgggcatggtggcgcttgcgtataatcccagctactcaggaggctaaggcaggagaatcacttgaacatgggaggcggaggttgcagtgagccaagattgtgccactgtactccagcctgggcgacagagcaatactctgtctcaaaaaggaaaaaacaaagtaacctggttgctagaattcatacagctttaggattcagttctgacatgatctatgacacatccatgtgctttcagttgatcagttgcctcccaagtgtcctttccagagattgagtaactgcaaaaatatccttaaggtttccagagctaaggtttccggagctgagttttccaggggcggggccagggggagtggggagttatgggagggaaggggcctgggagagggggaagtggatcaccagaacggctgaaggggagggctctgggcggagggagctgagaatgtaacacattccatttagtatttcattgattgtataaacaatagtaggtcaaaacttgatagcacatactttgccagagatactaattgaccaggaacttaggttacaacttagctcagcaggggagtccattgaagtgcccggatccacgtagctctttgtgttggcatcgctgctagaggaggaggggaggaaggagcttcactcaggctgcatgctaattcatcgatgtttaatattcatgaaaggattaagtcagtgttgatgtttcttctgctcctgctgagtctccacacctggatccagaatgctccatgatccgagtctttgtgtctttataaactatctttagggagctttaggactttatctcgggaaatattaaggaaatggttttccttaatatcagcagaaagttttcttacacataatctaaaatcagctgcttcatgatcttacccaggtgatctttctctgaattgtgcttttaagcctgggaggttaacatactgcttctctgtggatggggttttcaaattacccggcagcatccttgttggtgctttctctaatttgagatcctggagtccaccagggaactccaggtgaccaccttcaccaagacacattgctggtagtgcagggaaaaggtggcataagcacaggaagaagttaggttcagaggaaatttgtatcctcagcctaatagcaagaaaacgacaactgctaaaatatctggaagtaaaagaagcagcttccttttgtaacctcacgtgagaggttattcctaaggcatgggctcctcctatacctttagattcccctaggagccgtggtatagctgtggtcggcttctggtttctgagcttttccccacttagagctctttcacaggcacagatattacatgcatcgcctatgcattcaagccctcctgggacagccctgatctccagcatctgtcccagtgcctccatacatcatcaacacatccttgtttttcagtgtttctccatccacactgcatttcttagactgcttctcagggatcttcttgtgatcaaatgtggactgtctaaatacagtcactctatgcggggcaggtctctaaacccaaaaactgccaagctgtgttcaccttcaaagaaacacactcctatcagcagacttgggtgcacatagcctggggtgtgaggctgggtgctgggagacttcctgagctggggcacacagatgtcctgggtggtcctccagattatatgctactgtgtgaccatcagtatcctagagaaggggctctgtgttgggattttaaaattttgccccagaagctacagtgttagggtcctaagctgatggaggaatgtaggcctaagctagaagagcaccccatgggagctacatcgaggagaaactcagagcatccctctcatacacagtgacactggacagtttgaaatacctttaagctctacctggtttggcagtggaatttagtagctagaacagatgataatgtttttccctttccctgtgatcaccttggcagcaaccctttacgtttgagactacggggtcttagaaccaagttctgtaagaatttggactctgcaactgtatggggttcatttcacagtagatttgaagctgttggaaatctattgctgttttccagacacttgtaagtgttttctatataaatagatctaattaactttgtctagagaaaataattatctgggtgtaccttactttattaaactgatcagaaaacaaatgcaaggtattaaataataatgatttcttgcacaaacagccatcagtggcctatgtacataccacgccgggtctgccttcaggctgggaagaaagaaaagatgctaaggggcgcacatactatgtcaatcataacaatcgaaccacaacttggactcgacctatcatgcaggtacgaagattgccatccaacttaaaaccgcaggccatagaagccgaaatgtacatgaccgaactcctttcctggtgtttatgtattgttctgaaagacccgtatttgtaaaagctttctcacaaagaaaatgcattactttaaatacaataatagcctaaggaagaatttgcttttcaaatcagtttatcactgaatatattttaaaaatgtgacgtgaaagatattttcaaagtaagagcctattgcagtgtgtagcttcttccctgcccagcccccactttaatccgaggctagtttttatgctgggctagtgattcatttttatttcccttgaatgtgtttccccatcctttcccccatcattatgtttaattatttcctccacgctttaaataggccagacctcttattattgctgtttgcgttgttgtttgggttcgcgctcctaatcacacacaccgggagatcctcctatgaagctaacttgtttttgcctccaaaatagcttgcagaagatggtgcgtccggatcagccacaaacagtaacaaccatctaatcgagcctcagatccgccggcctcgtagcctcagctcgccaacagtaactttatctgccccgctggaggtgagacggctacctcatctaactggactcactctgtcctgtgactcccattctttcttctctcttaactctgccttcagtttcgcagccacctcctctctctgatcagtcgttgtgttggtagtgaagggtgttcttgtgcagcctttctacctgcttctctgtctcgcccagttaacattcctggactctctcacctgattctcattctcatttggctaaggccgtggtgacttgtgctggacgtgggcactctcttttcaggacttccaccgttcttgttgtgtttcgcttctttttgcctgttacctcattagaattgcgtaatccctctttcaaataccaagtgctgatattgagtttttaaacatagctattgctttgatcatttgtttttctttcgactgtagggtctttcattctatgggcatacatgtttctgatgcatatttgcatctctgcatcatggctgggcatctgcttgtgctctctgtcgtgtttgtgttgttttggtgccatcctttaacatcacaaatgtcagagttagagaagccaaagagcaaatgtttgaggtcctaagcttgactgtgtcttagagacagctgtgggcttctccacgccctgggtccagatgctgataagtgggaatggatgctgtctcttccacactctgatatgaatgtcatgggtaacaactgtgagattccagatcgttgtatttattgatgtagcttttttcctttttgtgctctaaaacttgccaatctgttcttcattagactgtgagctcattaagagcaagggcacatttttctccactctgtaaaatctccatccataatgcttagtacagaacagtatttttggtacatactgagtagctaccaaaggatggtggttataagtacttaatattgttgtgtgtttatccaacagagaaaatgtaaagttagattgatttaaaagtaaatgaatgacagaaaacaggttttggggatcttccctcttgtccatctccaaagagaagccttctgcaatacccaggtacattttggcacattggaatcgcacatgctaaagagttctaatcctcattgttattctttagggtgccaaggactcacccgtacgtcgggctgtgaaagacaccctttccaacccacagtccccacagccatcaccttacaactcccccaaaccacaacacaaagtcacacagagcttcttgccacccggctgggaaatgaggatagcgccaaacggccggcccttcttcattgatcataacacaaagactacaacctgggtaaggctgctgcttttatttggctccattttcatcatgaagtctggcattaattccttgatttccttagtgtttgtagttcttgcagaggaattggattgactgtaaagggtgtctccagagggtctcctcagcctgcatctggcccctgcataaatgggcgggtgggagtgggtgggcacaggctggtagctgtctttggtattggtgctgggactgccttttctcctgggaagctctagtttagacagttcaccgtgctggatggaaaggtattgctctgtgctgttaagattttgttaattgatcccgtctcacaaagtaatctcactaggagttataatcattttcaaataattttttcttttgtcagtttcttcttgcactttcattggcattacccaccttcttttgatttgtcgctttagtttttaccgttcacatcagatcagtattcacacatctgaggtacattttcatgcccttgatcatggggtaggggatgtactgagtgactttggttgtagatctgatagctcctttttgtgatcattttgtcaaaattgatttttcttaccatgcaactctttcatgtactcctgaattgtacccaagaaagaatctgtacattgtattatcttgagcaaaatgagattaatcaaaggcaaatatgcatatctttgtatttctgtgtcagttctttatttctttagccgaatcggtggctttttcagtgtagtatatgattcttttaaaagtcagttggtattttcctgctatataatctctatacctgtaattacactgaaaccggttcccgtatttctggctatttttgatgctgcagatggtttttcttccggttatgtccccatcgaattgtctagctagagttaactcagagtttaacttggtcctactattatctgtgctacttgctcaaaactgatgttatgggaatgctggttgagttttggtgattgttattggccctagctcttcggtcttggaccaacaataaacatacaccattaattcccatttctagtgatggacattaagtgtgtccatttgatagaccagcagccttatattcaagaacaagccctgctcaaggggatttgggctgtcattttatgccttgcccattgtgtggtatcagttcagtccagcaggtctagagggcgtgctcctagaatcctttgaaccgtgggacattgtgtcttcaagggcattcttggcatttggggcagggacatttgtgccttcagttgcagactatttaacaaacttggcttctgctaccaggtgctaatggtcaccattacccccaccccaacatagtgatgaccagaaatgccctacacatttcaaaacagccctaagtgagaaccactctaagagctctttctattttgaagtaagggaatggcctgccaagagaatttctcatttagatctggtaacattcatttggtaaactgataactgcttctaaggcatataataacatgtaggtttgactcccctactagtctgaagataatgttacagatttgcaagcaagccaagagtaagagacgggcagctcgttggaaaatatagtaatggagttctttttttttatgtctttttacttattaccatggaacccctggctgtcctgccagtgttctcatttactatagcactgctgtaatttcaagtccttagccagaaacaggctccagaaataagggctaacgaatataaaagtagatggattagtgtaaggagccactgtggcttgccaacataagctatgattttagtaattttaactagcttggtaatcaaatcccctaaccttttcacagcctttcaagccacaacaacagtgtaattgcagctgggcagattgtattttaaattaaacagcactcgctttatttattgcttgcaacattgctgaatgaaacccatttttactttccagttgcgcctgtttacccagatacttgttattgactaatttactgatttaaaatcataatctgttagaacaacgttttgttgctgctgctagtgtgggaaatcctcaaggtaacaactggaaattccacaagctactccccttcttaagcgaattcagatgtgctgacacagctgcgctatcgcttctaaacaaaggcctaggcaggattttccctgcggaagacacactctaaattgcctgttcattttgacaaaagatgaagagccggagggaagcatgaagataatttgcaacttaaaaatctgttttgagttggttttagggtttgctttgttttttatttttgaaagaagaagagaacaaatgagagaacagcatagctattcttagatttgagcattagaatagaaaaaggaaaaaaactggtaggacaggttgaaaatgatgaaaataacactccttcccccatcggcctgggcactgttgattcttacaccaaccagaagcctgaaaagtatcaggacatttcccctctatacattgagaaattaaaaaatttattgaaatatgtcatgaaagatgaccttttacacacacacagatactgaaggcagtatgccatcagtatttggataaagtttggcctcattctcttttttttaattattattttttttgtttttgagacggagtctcactcttgcccaggctggagtgtaatggcacaatctcagctcagtgcaacctctgtctcccgggttcatgcgattctcttgcctcagcctcctgagtagctgggattacaggcacatgccaccacaccagctaatttttgttgttttttgttttttgttttttttagcacagacagggtttcaccatgttggctaggctggtctcgaactcctgacctcaagtgatcctgccgcttcggcctcccaaagtgctgggattatgggcatgagacaccctgccaggccaagtttagcttcattcaaagaaagaaagaaagattggctttgttccccgcctgggtcaggcctttcagggaatgcatgctggagaccaggggcttgggagggatgtaccaaggagggatgttccatcctcagcagctcagagcacgtgtatacgggttgagtatccctagtttaaagattcaaaatccaaaatgatccaaagtctgaaaccttgtaagcactgacatgacactcaagcaataaatgcttattggagcatttcagattctcagattagggatgctgaagtggtaagtataactgcaaatattttgaaattcaaagcccctctggtccccaagcattatgggtgagggatgttcaacgcatattagtatatttgtgcctttcacaggatgaagcatgggcttgcttttgtagcaagaaagattacaccctagttaagttgcaggtttgttttccatccaagttcaaactaatgaaacttattactctaggtgtggttgctggtctcttccaggatggaaaagataaagaaaaaaggcacttttttttaatccctgtgttttatatattttgaattaggaaagccctttttaaaaagatactgctctttgcatcctgtttaaaaacactttgaacttgatggagggaagcaattttatattacacatgaaagagttcccgttatgaaactgaagaaaggaagaaacaaccaggcacactttatgcgttggatcatttattttcattgcatcagagccctcgttagtattccactttctcatcagctctgaagttgtccataactaatagagagccttgaccgccacttcatgtgccctggcaactaaggagagatgcctgcctccttgagtggctcggtgggagtcagggcttgagggtgaccactagccttagccctcagagctgattcatggcagctgctgccattatttttattatttttgataaaataatattataagcctcaaggcctctggccctcacagtctatgaagtctaggtttccatgcaaggccactttagcagatctttgaaattcggttgactttatacttcatgctctgcccctcactgcctccctgacacttttctctaatttcagcttcttttcacgctacggccccccccgccccccccccccctttaaatcaccagccttttaccaatagggctgattgtctttcacggtagcctacatgtgattccaaggtcaggctggccttgtgtgtagcattcagaagccctgccctctttcatgtaatagcagtcctcagctttctctaaatctggcatggtcataggctaggtggaagcccaagggtcccccgctggttgtggcgttacctggtccggatcagagttagcattgagtgggtagcttttgagaaattcagtgctttcagtttttcctctgtctgtagttaaccagtcatgaatgtttaccagattatcagcttcttggaccttctcaatcctaaatcagcttagcatatttctttatgttctgtgtatgtcagtgtactgcagaatactggattattttgtgcctctgcttagccttttaaaaaaatatattgggttcagggtcaatatgcatcacaaactgctaacaggatttctttcttcatttaaaagttcacctagctagcaagaagcaagggttgatttttgttgttcgtggtcttttttgattcttgccagttcccaagatctatgattatgattcagtgatactatgacttacacggttgacttgggaagcagaaaaatctagtaatttggcagcagcaaaggccctattataaaattgaatgaagctgatatcaaatgtcttcacagtttactttttttaatcttaagcttatttggttgatagtggttttttttttgagtataaagatatggattctcctttttatgtttttggaggcaagactcactgcatcacccaggctggagtacaatggcacaatcacagtttacggctcactgcagccttgacctcctaggctcaggtgatcctcccacctcagcctttcaggtagctaaggcaggcatgcaccaccacactcagctaactttttgtgttttttgcagagatatggttttgctttgttgcccaggatggtctcgaactcctgggctcaagcagtcctcccgccttggcctcccaaagtgctgagattacaagtgtgagccactgcatctggccttacactgcatttctttttcttttttttctttttttttttttttttttttttgagacggagtctcactctgttgcccagcctggagttcagtggcacaatctcggctcactgcaacctctactttccgggttcaagcaattctcctaactcagcctcccgagtagctgggactacaggcacacaccacacccgggaaatttttgtatttttagtaggaacggagtttcaccatgttggccaggctggtctcaaactcctgacctcctcagcctcccaaagtgctgggattacaggcatgagccatcgtgcccggcctacactgcattttaactgggtctacataagtgagagtcagctcctggactctgggtcataatctttgggcaacttcctgttctctctgaaactccatttcctcatctaaagaaacagaccatgtgcccaacctcctaccaagggtctgttgcaggattttacatctgaccatgcctcataaatcatgcagcctgacccaggttgtcagagtacatatttctcttttgttgattctctgtggtatcttatgaagcttatgctttaagaaaaaaattttgtaaacgtttaaatattaagacataaatgagaacttaatctgcagaacttggtcaagaatctcagtaaagttgtatcataactttgtgagtttgcctgatgaaagcgactctccctggagtagccacgtgacttcacagaccagattgacattctctgctgagttcagaaggagtggaggggagcacaagtgctggaggagggtgtggcagggaggcctattccctaacgtgttaggctggctcccctcaccgggagctcgggacccatggagagatttcgaaaccgttgtccccactccctctttgtgccacattcactggcaccctccattctggtttccctagtaacatcactgctgggactctcttccccttccccttctcaaggtctcagggaaatggttaacctttcatgtaaatattcttactctcctctctccaccaagcacaagaaggaagagtacagtctgtctcgagagacagtcagccaggcttcctgtacaaaacagagatgggacccatctcacgctccaggcatggacagcctggttgccttgaaacaaacagctcaagaagaaaagcacccagtaactgcacacagatacttccacttagcatctactgtcttttacatttttcttgcaggaagatccacgtttgaaatttccagtacatatgcggtcaaagacatctttaaaccccaatgaccttggcccccttcctgtgagtacactggagacacatggaatggtctgaatatgtgtgttcctttatccgctcaatgttgatggagaggccctgtggaccttctctatctccaggctttgtggatctcattggtttgtgtttcttaacagaattgggtgtttagctgaattgtagtcatacattatagttcatgtgatatccagtacttatgaaagaggtttctgaattgctagcttctagcagaagatagaccttgtacacaggatgttcaagagacgttctctgcaggtgacaatttaagtggcactcattcattttgtaacttagcaaccactgagtttcagtcatattgctgattaagtcatcagaacaaaaataatgaaaatagtatgggagaagaaggcctaattaatcatagaaagtttctataagtcatttaacctgcagatttttaaagtttttttctcccttgttggtgacggctcagtaggagttgagctatatacttaaaattggattttgaatgaaaccttcacatacatcctcctcaacaactcactctcagtttgaaaaagccgtagggggtgacagggcagtggttggactccaaggctatttttaaatgggaatttttgttgttgttttccaagtgtaagaacctttttgttgcctggtatattagggcaacattggaggctgcgaaggttaaggttcaatcattattcattaggttatacaggtatcccacaccaaatctgtttggttcctgggttcaaatagaaagaaccagagagttagtttagaaaacaaaagaaagcatttttttctgaatctgttggattcctgaggttcagatagcaaatatggatagttcagataatgagggcataccagctttatcttgaaaaaattctccaaatctgtttagttcctgagcttgactagcaaaagttcatggtggataataccaatattagatcatcaactgcctggacaacacaaatacagttaaccatgtctaacatttttatattaaccccctcttcctttcctttagtactcagtatttatttaattaaatggtactcaacttcaaactccactgttccatggaatgctgcggtttccctttgaagcttttgagctagcagcccatttccggttcttcatacagtcagcgcatctgagacctgagcatgtgataaagcgtgttgctagacatggtcaagagttaacttgaaatgttcatatttagttcacgctcaatgcataaatgtaccctagcagaaaagagtacagaggtgttctatagtttttaaatgttgcctttgatttcagaactcctagctaatgtttatattttctctctcccttccttccccggatactagcctggctgggaagaaagaattcacttggatggccgaacgttttatattgatcatagtaagtaggcgctgttatggacacacaggtgttgtgggttagagggaaggagtaattcaaacatcatagtgaaagctttgtcattttactctttatctaggcagccaggtgttatgtggagaaaatgataccagagaatcagtgccttcatacggtactgtgcattcaccccaagtttgcttaaagtagcccatcaaactttcacccaatctgatcttgtgacctattaacgtgtttttttttgttgttgaatttttaaaccacattttgattgttgatcccttgacttttgcacatttaataaatacactctggtaatagaaaataagattagaaatgatgatttagtcaaaaatctgtgaacagtgcttgaagcagcatgtaagttttttagacactgccttcaagggtcctatggcaggatgcccgctctgaccttattttctattcacggcatgtttccttgcacccacaacactaatatatatgtattttctggaaattgtagtatatttgctatagacatttgctccagcacctatgaaaaaatgtgtggtttctcattccaactaaaagttcaactaataaaagtttgctttttagccagtgggattttttttttctcattctttttggaggtgccatgttcttcatggaatcatatttctatgtcccttaaattttctgaaaaagtatattaaaaagaagccttcaaatagatgtaaagtttcaaccatgagtgcaatttggtagtatcttggtctttgctttcatttggttcatgaacagaaagttagggtttccctggcttcacaatttcataactaaacaaaagcacgttgatgagccacctgctgagaagtctggccacaagtaatcctcacacgtataggactggtcactatctcataggcatagtacgtttttcagatgttactaggaggcagagacattgtgaacagaatttcactttcaggccctgggggttgagggcttattataaatggaattaagcaaaagtaccagcagtttacaattcaactgaaagtagaagtcctaggtgtatttagaagagtgagctaccctttgtttaaaccagatatttcaaggtgcagagacttagtttttgtcttttatcaaaaaatgggcagatttgtcaactgtccagaatttcatagtaagcataaagtatttttcctgctttcatgtatgtgtatgccctacttttttccttaatatactatttatttattgttttaagagaatttactaaaatgagagagaggccacacctctttttcccatgaaaaacaaaataatagtttccggcttggtgcagtggctcacacctgtaatcccagcactttgggaggccgaggtgggaggatcagttgaggtcaggagttcgagattagcctggccaacgtgatgaaaccccgtctctactaaaaatacaagtaaaaactagctgggtgtggtggcgtgcacctgcaatcccagctacccggatggctgaggcaggagaatctcttgaacctgggaggtggaggttgcggtgagacaagatcataccactgcactccagcctgggcaacagagggaggctgtctcaaaaaaaaagaaaaaagtttcctttatagtattttttatacatcacaatcacagttttaagacaggtgtgaataatactgatcattttactaaaacaggtctttactggtaacacatcctggtctgtgacgcatggagagcattgcacacaatattgtgacagttttctggctggagatgtgatgcttaggtccccctaaaaagaatgttgtgaatgtgtttcgtataccgcaaggagccaaaaacagaaaaacacaattacaaagggctgtcgtagcatgcgttaaaatagtgaaaatcactgactatttcacttgtggtgtcatagacctagtatgatacatagcagatgcttgatacttggtgacttgaaatcaggttcatggaggatcagtggtgaagctcttaggaagttgttgtgcttgatcagaaagtgaagtgaactcacttgaggagcagtaggtgcccccactccggctttccacccccaccggcctgaggctagcgcaactccggcttactggaaggtggaagaaggtaactacctgctagatgcctgggcttttccttactcctgatcagttctgcagttactccagcactctgcccaaacatttcctcatttcacttgactagagcagcacccccgaggctccattatactctgtacagagcttgatgcaactaagctgtgccaatatatttgtggccattgacttggagattaaaatttattttgcccttgcacaaccatattgaaagattctgttaaagagatatagcataaattaagtgaccaaaaaccatttaagaaaaggatttgtttacgagtgcctccttagctgttcatgctacgtttctaccatcgctccataattcatcaaggtttactcaatggaaagctgtagagcagtacacgtcagtgaaacagttcaagtcatttgcctttccacaaaattcagtctgtgaaaactgcagaatacctatcttttgaagaggctttatcaggctgacacatacattccaaatgggttgaattacctggaagataacatttaggaatgtcctttctgtcagaagaaagcctctttttctaaacaatcttatagcaaaactcagcatctgattttgctgtcataatgcctacaggacaggaaccaggttatgcccacgtatgccacaatgccgtgagtgccgtcatcttgtaaattgcttagagtcatcttgtcttccagcatacctggcacgtgggtccacctggaattacagatgagatgatgagatgcacttgtcttttcaataattaattatttctgctttgtaagtttttcctgagaagttagacattttcaagatgaacaatactcagccatcataaagatttaatttcaagagcaacgaatgatcgagactaacctctttagactcctcgattcctttgtttgctgtctatggaatggctcctggctcttgggcctcaggtgggaggttaaaggaaggtcttaaactgaatctctacatcttgtaggaatgatgtcattcttcttaaagaccagacaggcccagcagctgagtaattggccacaggtatcctatctacaacattagaagagaaaattgaattccagtgattttgtaaagtcctattttagtctttcctgtcaacagtcttactagacctgttcatcgtgactaaactgagtttctcatccttccacttccttcttgtccttttattggaaatatatctcaaagaggaaaagcaagtttaaaagccaaagttctttaaaaaaaaaaaaaaaggataactggctaccccatactttcatacattgaccatacttcactgaagaattctttatcataaccatgtagaaacttgtgttgttccaaaagcttaggctctttttaaagggactttgttttcaccatcagcttcattcagtcattaaaaaaataatgcactaagttcctgttacctgctgggactggtcttaagtggtagagaggggattgcaaagatgaataacacacagtccctgtccttggggaggttaggtccagtgggaagtagcaggggatatttcaggtgttagaggagtgaatcagttgttacacagaaacagaagaggcaaggactgcatctgcttgggaggtggttgggcacagggatggggccctgagagaatgggtcactttttagatggatgacaaacactgagtaggattgaggcagtcaaagccccaggaagagtgatcctaggatgcgtggaggtgtgtgaatatgtgcagatgctgccacgttccgagaaacgcagcattgctccaaacagctagtgtgccgcaggggcgcacaggccaagccaaagggtatctgcccggtgtggggactcgggctcaagccacaggcagtggggagctcccaggggatttcccagaggggagggatggggtcgaaatcgttatttagagagatccttttggcagagctgtagaagatgtcttgaactggggttggggggtgagacaattcccagtgacgcccagagaacagttcagggaaaaaaaatgagccctctagcaagaagcttatcaggaatagagagggttggtccgggaccaccagagtgagtgacacggccaggttcctgattgggacagtgagtggattgtgatactgcacattggaatgtaaggtcacgttaccaattttggtgttgggtgatcagaggtttggttttggtagagttaagctgaagtacttacgggaaacccagatgcagatgtccaggatggagcttgaagttcaggtctggtctgaggacttgcgaatcccaatgagtcaggagttattcatttattttctgctttgatgacaatatccattgatacggttataatccaagttggtgttttaaggcgcaatttttactcagctgtactccgtttcctttatttggttttcttttctcttgttttccatcacaatagcaacttttactttccaaagtcttctgtgaaaggtaagggacccaaaaatgccttttgcttccatcaagattctctcaaacagttgagatttttcatgtaaattttctgccagcatgaaaacaaaagattctagaatcatcacttgctttggtagcttttttttttttttttagcttttcctctgcttctattaaaataataataagactttttaaaattcctaatatggtcattaaaacagaattcactaattattcttatcagctcacttacagtgtatacagaaaataaacagaatcaatattcttcccctgcactcccccgccccggtccccaagacaggtgcagatcgggctggagcatagtggcacagtcatagctcactgcagccttcccctgggctcaagcgatcttcccacctcagcctcccaagtagctaggactacaggcgtacaccaccacacctggctaatttttttttttaaccttttgtagagatgggtcctcactatgtttcccaggttgggcccgaactcctggcttcaagtgatcctcctgcctcagccccccaaagtattgggattacaggcatgagccactgctcctggccaccctttacttttcaaataattttcttcttctttttttttttttttgttttttactaacctagatatccaaaaactctggagaacctactctccctagtgtgccccaccccccgtacctttcatgtgagtccattgcactctctctccctccactccaccctagtacacacacaggaatccgtaaggtctttttaattatgcacagttacaaacaccaagtgatctaaggcagctgttgtgtattatcacctacacaagtaatggtatagatagcattgaacagtcttgtgcacattaactcacttggaagaaagcaaaccaccttttgccagtgtgaccaaacagaaaccatgctctgtaatcttcctctgctgtatctaattctcttttttggactgcctaagctgctttgatttttgtgtgcatatgagtgacgcatgtaatagattattcatttgttcaatgcaggattcttaattgaaagcagtttttcaacaccataagtaaagagaaaagtatttgaaatgagaaaaaaaatcgtgtgtgtgtttgttagccttttgggaaactaagactttttaaatgctttttttcaactaaatgaaaatcaagatcaagttataaatccttaaaagaacaggggtttataattcccattttagcaagttatttgcccaaaacagtatgaatagatggtttatctttagttgtgcatttttgattgagtgtttttaactaaacagtatgtgaggggggttgccatatagactgtagttacctgctaactctgaaatactaatttgtctttagaacacagggtgggggactggacagcttttgaagaatccagaaatacttccttccaaaactttctttacatagaatagatttgaactaatgttctgattttttttttttttttttaacattttcagatagcaaaattactcagtgggaagacccaagactgcagaacccagctattactggtccggtcagtattttcaaattctgcctcttcagtataagattttggttacgtgtttacgtgtttcttgtgtattactgataacggtgatgtcaagggacaacggtgattgagtagttgactagaaacagagcactttgctgccatctccttactgaagtttccaggtgaggtacagctgcatgtgccttttcagatggatttcattataaaggaaaacagcttgataacgacagcagaattaaacatttttcttctcctttataaaagggtggactataagtatagtcaaaattccctcccttcctttttatatgaagcaaaaccaagccctatcttcataaagtgttatcatttctttaggccaggagtagtaaatgtatgccaaaagtttaaatcttttacaactttcaaaaatctgtagaagtttgggtgagattatagctaagttcaggagctggcagagttaagagtttggaactctgccgacccacagtgttctcatggtcccctcatatatgccgggtggaaaaagaatcaattctgatgcaggcgtgatgacctcttaaaacaccgtagcacactgtgttcataaggcagtgtgagaaccccactccctgaagcatcaggagacatttggtatctcacacttgttaacaagtctgtagaatgggaccacactcatcagcagagagcacaccaccagcttttgtcagtggctatacgagtgcagggaggtaatttggaattacaggagttgtactgcgatcagcagaagattgcaaatttgggattcttagaccagaggagcaaaaggaactgaagtttgttatatcacatgctgagctaagaggccagtaggtagatttaaaattccaatttcatggctttaatctgattccattcaaattatgttttgaattagtaagatacatccatttgaaaacttaaaagatactacattgcaaatgtgccccggtaactgactcctgttagttacttgttggatttgtttagtcatttgggtactatttcctaggcaaagtgcccagtagtacctgggtaaaaacagtcaacttttttctctatgcggcttaaacactgccttactctgatgcttccttttgatatatatatattcgcagtcacagttgtttattggaatattattttctcttctacatcattagaacaaggtaaattcaagaaactattctttttaagtgacagaagacttttgacataactttgaagccttttcaaaatatttttatcacttatcaattaccggccgtcactcaaacactgctagtccttattaaatcttactgaaaattgctcagcatcataaagccaagtagatttgcccccaagaaagagctctctgctttctgttaataaaagacccttgtttattccttcatttttattattattattcattatattgctttcaatagaggagaatctgtatttaggtagttatcaacttagtgtagacatttggcctttgttgtcattcagttctaaatatttggcaattttcatttgatttttcttcttgacttatacattatttaaaatatgctttttagtttctaagagtatgggagggttgtgcctattcatttttttttattgatttctaattttattgcattatggtcagataatattgtctagagaatatttattattggatgtttatttaaaacttcattggaagcttgatcactttttgtaaatgttctttttctttttaaaaagaatgtgtattgtgtctttggttgaatatagagttctttttgtgtccattaggtcaagcctgtggtgttcaaattatctacattctcattgctattttgctattggatctaatcaagatagttctgtcagtctctgtggtgactgttgccctgtcgatgttgtctgaggtgtatataactacattctctttctctgttcgtatttgctgtttagcatatcttttctctctcgcgatattttatcttctttcttgccttttgttcaattgatagagtactctctattttattttctctatgtgcttgcaggctgtactttctatttgtattcttatagctctcacattaaactgtgtaacccacatacttgacttagggttaaaatgaatcactgtctactctccttaacatcaggacctcagggaacttgaatgccattcttcccactcccatttgccacgtcattgttgggtggaattttaaaactaccttgctttaaactttcctaatagtcaaatagtcattaatatgttttatcttttttctccctactgtccatactgatttaattttaccaaatgtagacaaatttctttgcccaccattggtttgcccaccattggttcttccatccattttttttctggggtgagttttgatcttagtgaagcctagtccagtttatggttcttactgtgtggtctgctgaccagagtatcagtatcgcctgagagcttgttggaaatgcaagttttcaggtcctaccccagacctactgaatcagcacctctgggggtgggacaccagtctttgttttaactgctctcccagggattccagtgccccctcaggtttgagcacttctgcccagcagcactgccagtgacagtctgagagtggtaatatctcttagtctttgactcaaaaggtctcatttgacctctctgaagttcagctgatgatagaaatcttggttaaattattttccctcagtgctttggagattctcctgcatgtcttctggcctccataaatgatgataacaggtttgctgtcaatctcattgtcgtttctgtgtaggtaaatggctctgttctctagtgattttgaatttttatttgtgtcttagatgttttacaatttcgctatcatcatgtacctatgtgtggagttctcttcatttatcttgctttggactcaggcttcttcagtatggggattgtgtctttcctctgttctggaaaattctcagctattatttcttaacatactgcatttttccgattctctctaagtatctgtttctgtaactcctattggacatttacttctctttcacattgtctgctttatctcttaacttttgtgttttctgtctctcactgctgtattgtgagttattacttagctcttccagttaattctttaagctttttttgtaatctctttatcagttcattgtgtttattatttcagtgactaaatttaattgctcaaagttttatttggtcgtttaaaatttgcttttgtcttcatagttattttgtcctgttctctttatctctttatttatttttgatgctttcatctgcttattatttttaagatatttatttcttagcctctttgagattattctattatctctggtcctaggatcattaaatctcccactacgtctgtagactctccttaagagtgtagattattgcctagttcagtttataatttgtgtgtgtgtgtgtgtgtgtgtgtgtgtgtacatgcatgcaagagggagagagagagcatgagcaagctcatttttttttcctatgaggcttttgtaagtcctgacctgtatttactgttaacttcttagcttgggttcatgcacccccagtcagtataactgtggacctcatacccactttggcacaggcttggagtatggatttattacaggtctgtttctttttgtttttctcccatttatggtcctggacagaaggtaagcttccttgcaacttccctggtccggtgggtagagttttcttgtcccctttccagatgttaggttttaaacaatgactgttctttctccatcatgtagaccaaaggccaagttctgtgtccccatgggagattaaaacccaagcccctatgtctaggtccagtgcccactgatttctctaattgtgagtctttctgcttacctagtacctagagtttctcttcccaagttttaaaaatatcagttctaagtaggcctagcgtttctacatatttttagggagaggggaccctttctgtggcagctcagtgttcagcattcctgtaagttagcatgctctgtgtatagcagatatcactagtaatagcatttagtaagtgatgttcacacatgctgctgtcatgaacactatctcatgttgtgtaacactttcatttttccaagaactttataatcagccgacttgaaactcacagtcgtcccctcagaaaggcagggcaaatgttgttatttccaatttgtcagaagctcagaaagcttattctgttgctgacagtccttgcaagggtcagaatcaggaccggagccccagatgcgctggtgtcactgatgtccccgtgccgggcatgagcccttctgtgcaaggagctccaatgtctcccggccagtgatgatgtgaaaacatttagaaccgacctacacaataaggcagattttcattctgtacccaaaacaggaacacagatttaatgcagagcaaaagggctttaatcaacagatatgttcatttttcacgtagacctattttacaagctaacttgtaagccagaaaatgacattcgagattttcaagtgagaacaaatgatttggtccaataattaaaaaaaaaaaaatgtacgtgtaatctcttcagaagctgcactggaaggatgtttgtcctggtacgttgttggaaagttttcaggaagagaatgtaaaaacttgctcttcttattctatcatgagaactacctctggagagaaaagataatgaatgcaagaggaagacagtgatttttcagctttcacgcatcattccccagaaggagaaaggcttgaaatatctcaacatttccgcccacacctcctcagcccctgccaggagacagagcaggcaagggaacgggcatcataggctgggggccacatgttgaaatctgctccttggggaatttgtcatttaagacagtcgaacttgcatacacagtgatgactgtttaagctttttttccaacattttcaggagtagggggaactgtgatgtaacagtgatgtttggagaaccctcacgaatacaggaacaaacaaaaaatagttgctgggaatcacagactttcagaaatagaagagctgagtcacgtttgttcatccagtcaaattcttccacttaacagtgaagaaactccttagtagagaggatgtgatgcagagccagctgatgagagtctacccgagagtgcaggccttctaacgctggcaggagagagtggaaggaagtcacttttttagttcctatggggtcatttttttcctcatggcactaccacggtttattcattgatttcctattgcctgttgctctcaacagcttgtgagctccaggagggaactgggaaagctacctttggtttatgtactgttatttttctggcacctaaaatgccttgcacagagtaggtgctcaagaagtatcggttgaatggacgagaatgaacaccagaaagtgagaaataaactagagaggaaatcttagtttgtgacgggatgtactgttggtagagcagaaaacatgatctctttattggcttatgtcagaacattgtattctttttcttattttggtggttgtccaggtattaacaaatttataccttgcctagactcagaattgctatgtggtttcatcagactaaacactgcctaaaataaataggatgtgaggtcaaatctgttgttcagtggaaaatcaaagaagactggcttaaaaactaagaaaagaccataggcagtgtaaattgtctatagattgctcctaagctatataaagatgatgtattttttgctctggaattacagagcaaaacactgacgtgctcattttctggaagagtggttgtttgttttgtttcgggttttttatataaacatgtcttaaaactataaaagagggaagttcatgttcttcatttcttctgtttctggtcaagataagtatggtgaaagtgtaaggtttggagtctggagatactagactaaggatcagtatattttattaacttaggccgaaatgataacagcagaagtattctctgctgaaattcatactagtggctaaaaagcaatgagttgttttcgaggctgtcatagttaatgtctgtgtatatgcaaaacccaatcctttttgctcataaaaatatcgtaagctttttcagtagccaaaactcacggccctgactctaagatattgtaagctactttacaaggtagcaaataaagattatttaaatgactacattaacatgttactcctttgcctgaagagatatcacaacttttgaatgactatagttaactcaattcctgagccctcaactggggtactatcactctatttcatagataaagcatttgagatttaaagaaatccttgcccaagaccactaaatattaagggacaaaccttctgacttctaaattgaggattttttgagaatgccatctgcctgattttatattccttgataggagtgtcagttcacttccctttctgctcgttgtatttccccacaaaaattcgttaaaccgtaattagacttttcaaaatgccaacgtaggtcattctgggttgtatgttagaagtatttagccaataactcttacctaaaccacagcaaaaaagaaaaacagaaacaccctgactcatattctgacaaaagtcacttggaaagcatgtttagtttgtgtagcgtaccccaaatggtttctcaaatagcagtatagctgttttcaggggtgaaagctgcattcaaagctgattagccctcatcagttctaggactttcccctgtgctgtgtagacattatctaatttttccatggataatctgagaagtgagaatttacggtttatgactcatgaaattctcttgaatgttgcctcagtatacataaaatttcaggtgtattgtttgcattatctatatttataaatttatcttccaggctgtcccttactccagagaatttaagcagaaatatgactacttcaggaagaaattaaagaaacctgtgagtaatcatgccttccaaaaatgctttgtgttagtcatttgtaagttaccacagtcacttcagtgagaacaacttggttgttacttttatatgaatgctaaaaatattaccttccttttctctctgcactttgatcctcctggttctaaaatctgaattttctttttaacagaaatggtaagtgaaaattaactcagtgttacatatcaaatcacctgaagggtaatttcctatgtaatacataaaaagacaggaatgatttttatgggatataaaataattcagaaccctagtcacaaaatctgtggaagcctattcaattatgcgcagttatcatatttaattaacctggatcccggtaagaaaaatgttcaagtccttccttgtaaatgcaaaagcttagtttcaactacagtatttataatatagtgttatatttaattataataattggcagtattacgtccaaatgtaattttctacttataattatccctggcagtttaaaacctagaaactctaaaaatttttatgggcaacattttaaattataacattgcattttctaatgacacaccatccccaaattgttcaacattgcatcctctgttttactttccgattcctccttagcagttttctcttcaattttctccatcactatggttacacctctagggaggggagagaagcggctgcagctcagaccccctctggtggcctgggctccattgccatctctccctgcctcctcccctcagctggttcctcctgcccgggaacatctctggatggggcacaatgtctgctctcatttaggggttttggtctctgttccaaagtcctgattcaagagcttgcgggtaactgctattgaaatgattctttgccttcaaaactcaaatgatcactgaaaattccacagttttctttgtgagtcatgtcccctggtaatgatgatgactgtggtcatcacccagtctcactctatggctctcacatagcagtgtctgctacccggaaaccatctctgcacattcattcttacagccagaccaagcctggaccgcctctttgcaggaggcagttgccacaaccttggtcaagtgttttgttattttcatgtcagcgaaccatgctttgggctgctttccccacacttggcataatcaggatcccactccccatggcaacaaaatggacttgaggcagcgtggattatatctaccacctggcggccctgccacagttgagcatggataggcccaacctggccaggtggggattattacaggttttgactacctgggctaaagtctcttgagtgaagcaacagatacagtcgactgcctttcggttgccctatgctggagaagtgcccacagttgtttattaaagggggcaaggaggatgttctccttcgcagcagagttctaactttcctgagcatcgctagtggatgccgtgtgtcccatcgtgacacagcaaggctttctgtctgcaagggaaaacccctaaaggagagaatctcagttggaaccatttgtcactgcctgtttctttgaggactgccaacttttctaccatttgctgttgtttttattagaaaacaaagtgtgtatttactgtatgattatgtgttttcttttgtcttttgtgtaggctgatatccccaataggtttgaaatgaaacttcacagaaataacatatttgaagagtcctatcggagaattatgtccgtgaaaagaccagatgtcctaaaagctagactgtggattgagtttgaatcagagaaaggtcttgactatgggggtgtggccagagaatggttcttcttactgtccaaagagatgttcaacccctactacggcctctttgagtactctgccacgtaagtatatggccacacccagtgtgtgtcccccactgagacagttgtatgaatttaaacagaatgaaaggataagcagctcatgagttcgagatgcattaactctgctgagtttgttctctcctcaccccacagccccttgcaagtctagaacaggttctgactctacgtggtgaaatagtgtactctgcgaacatctaacattgattttttttcttgtctattgggttcatggagttgaaattgaaaacgtggataattatgataaggaacaggaggcgattttcatttgcagtgttcaagaggaggacttgtcagtgttagaattcaaaaacaaaggaggtgttttttgaacaagagtcgtttctgaggtctcctgtgtaaaggcaaattgtaaggactttgaggacctaggaccatgccctgctcctgtaaggaaagaaccaggtttccccttgcattaggatttcatcattgccaggcttggaaactgaggcagactaaattgctttctgagcaattaaacatcagctacttccaggccagccattcctccttcagactctgaatcctccaagggttgggcagtacccaagcccccagtagaatagtcattgaccttgctgaagggcatttgtcatcactccagccctgggctctaaggggacgtgggttcccccacatctcccacctggtaccagtctcctgggggctcatttggaaggccgcctcagtacattcttcctggttgctctagccaagaattgcccaattgatttgttgttactgagtcccatgagaaagcccactatgtacaatgtatccaactattgaaggtggagggcagggtggagagagacaagatctttacctcttctccacattttcaaagatacccccaccccggaggaatcagtctgtgatcccagtttgaaaactactgatccacatgattgtgaaccaagcaagatcatttggacaaatctaaaaatttgcaggtttgcatcattgagagagccatatcctgttcctaatcccctcgaggccttttcagagcagagtagtggtcagaagacagaccaagggttgggcccatagcaaacatcttatggccaagccaaaagcctctggaaggaattaaacttccttcatcacagagacgacctaaagtactcacatctttgggaatccctgcacagcccctttattatgtggcgtttctcatctccccaagatatttggctgaaccatatgaaatagacacttcgtaggtcaaaaacagtcaaacatcagcgtctcttatggtttaattgactttagagggcacatgcgtcagcctccatggtgggtcacggttgagcatgtggtaagtcaggtcctctagcccacacattttcccactaggtacagaatgctcgcagggacactgtaaaagttgagtgacaggtggcaaacaaatatgcaaaatcttgcatttgaaagtgtgattgggcttttcttctctttctcctcaaaagggacaactacacccttcagatcaaccctaattcaggcctctgtaatgaggatcatttgtcctacttcacttttattggaagagttgctggtctggccgtatttcatgggaagctcttagatggtaagtcttgaagtaataaaaataggtcagtgctgcttgcggtttgctagtaggtgtcttatctttcgcatcatgggtttttaagcaaaagcttcactggtttactcataaagtatttttatgttttgcccataatggatgtccttttctctggtagcttattttgggcactgaagacatagtgtctacacacagttaaaaacaaaagtttttttttaacttcagtgtaaaacacagaacattatgtatttatacatttgtatgttttctggaataactttagtgaaagcaagatttgataacagatggaaaaactaattgaaaagttaattaaaatgatctcatctatctaatatcctgtgattattgcgtttgtccccaaattattttttaatttgaagggactaaataatttcaaaataatgttactgcttagctaagacattaaccctgaaacaaataacacaaaataatttcattcttatttaaagcatatagatcatggaagaatttcaaggtaccttgaaagttagaagtcaaaccctctacctggcggtatctataggcttagagacttctaaaagatttggccaattcaaaatagtgtccttaagaaaacactacagaaatcatcagtgagaaaaaagcatcagaaatactttttaagagcctggaggtagagtggttgaggatgggaagagggagagtaggatttgagattgacattgcagtaacttataagaaagatatttccaagggaactgtgttcattgcatttatagagccttagctattctaataaataatttgtataccctctgtacttttcccatgaatatgtttttactgttaattggtagctgatattgatgctctgattttgttgctttatttggtagcagggcgacagtaaacactttttttcctctagaaggaaactaaaccacacactctttccatgtatgtatagtgtgaatatattttaatttccagctttggagtcatgccatagattgtttcagcctgctccaattcactccaactttctcagaaggtcagtttagtcaccgtatgcaagtgagaagatgctgttagttgctacagtgtctttaataccctctctaacagggggtaatagagaagcataagatatgatcctgaccttagtcagcttatattttagcggggggaaaagagatgagaacaaaaccagaagaatcacagtgatagtgtctgagcagaagggagtgcattgagtcctcagaggagaaagtgacttggctggaggctcagggaatctttcccaggatgagctgcacctcggaggtggggtagcatttgagcgttcaaaggctggggtcatttcagatgagtgaggaccagcccagagtcaaggccttgtggaagaagatgggcggaagcaggaaccactcagggtctcaaggagctggctaaagtgaccccgacaagagtgatcacgatataaacctggaattgcacatttaagagtccaagtgcacatagatgggcctagtcagcagtgtcttcaaatttcccacagatgggaatgtccctgtcggcagggctcattctgcacatctgtccgatgggaatgtccctgtcggcagggctcattctgcacatctgtccgctgctccccctggtcggcttcatgcttttacttccccagacactggagtctattggagcctgcatagggccacgctgagccggggagaattggcctgtactgcagagggtgggtgcctggtggggggatgaaggagcagaagcaggagcctggggtgccaggtctggtggggtcaggaccccctgtgaggaggtgcgtgatgcctttggatcaggtgaaatggaggcacctgcaggacgcctgaatggtgggaggccgacctcgctgctgttgcctccctgaggcctctgccgtccctccgcggggggttgcacaggccctctccggggccttccccatttccagcctgtccccttcctgtgctttctccccatcgctgcccaagcaatgataacagaagacagatggaatttcacctggcctttcactgactccccactgccctcagagagcaccccaactctccagcaccccatgtgggctctgcactgccggccccttctctggcctgtctacccgccctggcaaacggctggcaagtccccagccttgttcctctgcttagtgtgcccttttctcccccaattcctacgcctgatttgcactgcggactctgcttgaccttgaagctcatctgtcacctcccagaggcctttctggccccactctgctgcgccatctctcttagcacagctgccctcctcatgccactctccccctgatctcgcctcctcgcttgtgcaatactgtagaaggcccttggttactccttcatggtttctcatttacattgaaagcaggttaatcttttctttcatgctctgatacatagcagtgtcaaagacctgaaactaaacccagtgtttaccgtgttttaggtttcttcattagaccattttacaagatgatgttgggaaagcagataaccctgaatgacatggaatctgtggtaagtaaatgcacgtcacacactggccatcaccgggcactcgtgtcttatgagaaggtattggagagccatatttgtagtctcagccacttttatgggtgttgcattccatgtgaacaacaggagacatttaattgcttgaaaagttcattgatctaattcttgtaataaatcattgttcacatttcctggaaccatggtacctagggtggatacatccaaatcccagttgcctctgcttacccggcataggacttgtgtgaacttactaaatccaagagacagctgaagatctatggtagcctgtgttttctataaaaactgctgctgctgaatgtttagagcttcatccgctctccctctgtttcctgacatcataaaaatggcagaggcaaaggtcaaaacaataggaagagtatcaggcagacgtcctagacatggatgagtgacgccacagctcaggcaagtgaacacttgagacgttctccaagtagtgatttgggttttcatgttgcatttaacattaattttacctagacagaccattttagagttggaaggattttattttttttttattttttttattttttgagatgatgtcttgctctttcacccaggctagagtgcagtggcgcgatcttggctcacttccgccttgcggattctagcaattcccctgcctcagcctctcagatagctgggattacaggcacacgccaccatgcctggctaattttttttttttttttttttttttgtattttagtagaaacgaggtttcgctatgttggccaggatggtctcgatctcctgacctcatgatcctcttgcctcatcctcccaaagtgctgggattacaggtgtgagccaccgcacccagcacggatttgctataaaacaaaaattgatgttctttttataatatacttctgcttctgtttttcttttaatgtacctataccccacatctacctccagagtgtatgggtgtttgcccacacgccagcacacacacagggccactgggaagcgcgtttgtccatttggggtatttgcagctcattcgtgtttgctcacttgagttaaaaagcccctgcatgatgtcacctgcctgtgataccaactgtattttgggcacggttgggtagatgagctgtgtcctcggccctgaccagcgctgactcagtgtttctgttgctcctcattgtatgaaaggagaggaagaggccagcagtgcccttgaacccactgctggtttgccagtcatggtgggttgggatgcacacctgtgattccggtctccactttgaccctgtgtttgtgctttctgctttcatcactgtatgatgaagcagctaggagcacaggaatttctcttaacgtctaactttataccacatgctgacagttagtgcctaaagtacagtgcgtgtattatttttaccctcttcacagcccgtcgtgtccccagcaggagagaccgtggagggaccagggacaggcgcttaggcctgtgactgatcctctggattctgaaaccagagcagccaccctttttgctgacattaacctggagagtgatcaaagcacaagaaaggggataacttaaaactattggtatttacttagttggaacattattttacttatttatttttttggcgatagaatcttattctgtttgccaggctggagtacagtggcacaaccatagttcactgcagcctctatcccctggcacaagtgatcctcctgtctcagcctcccaagtagctaggaccacaggcacacaccaccatgcctagctaatttctttttttttttttgtagtcatggcgtcttgctatgctgcttaggctggtcttgaacagcctcaagccctcctcctgcctcagcctcccaaagccgaggattacaggattataggcatgagccagcaagcccagtctagaacattctttatccttcctgttttcctcagatactttcactctttttttaaactttatttattttttatagagacagggtctcactatgttgcccaggctggtctctaactcctgggctcaagtgatcctcccaccttggcctcccaaagtgctggaattacagcgatgatattttcactctaaaaagatagaaagtatattgaccagcctggccaacatggcgaaaccccgtctctactaaaaatacaaaagtcagccaggtgtgatgtcacacgcccgtaatcctagctactcaggaggctgaggcgggagagtcactagaacccgggaggcaaagattgcagtgagccaaggtcatgccattgcactccagcctgggtgacaagagcgaaactccatctcaaaaacaaaaaaaaaaaaaaaaagagagagagaaaagaaagtatacttatgtctgtatgttaaattttgtagaccagtatggcagctccatccaccatccagagtaggtgccttccactgtgcatcactaaggacaggatttaactgcaagctcattacaactaaagcagtttgtttgtttatagtttaaagaggaaggtttggtttaggtggagcaggaaacattgcattagtaacatatttcttgagcattctgcacagaattacattagaatgtaattaaagaagtcaaatgagtttgtattttggggaaaaaatgctgaattttcactcctgtgtcattctgtaggatagtgaatattacaactctttgaaatggatcctggagaatgaccctactgagctggacctcatgttctgcatagacgaagaaaactttggacaggtacatgtgggtaaccctgggaactcttctttagctttcaaggggcatttttcttcttgacgggctgtaacacaactttgctggaccatcagaaacaaccagcaggagctgcaggtgttaattttcatctcattgtagcagcacctttttgtcatgccaagacgccacactccaattacaaccatttctctcttccagcaaagttacagaaattccaagaggccttggggcatgaaccagcacctcttctaatccaaagcaaatgtgaatgtttcatttgtgcctcggttttagaatttaggtacttgaaaaaatagtgagattgttgacttagcgatgtaaatacatgaccaggagtgggtgatgttggaagggccattggtttttctctctgttttatggttctgttgtcatggcgacatttgtcttgtgaggctcagcatggcaggctccggtttttctaccattccctctgctttgcccccacgctgttattcaggctggactaatcctcaaagtcagtttcagactggtcagcagggatttggatgggccactgaaagtggatttcaaaggtaaagttgcctgcttggaataattctcatcatgctaaggatctatgcgatgtatttgtctcaattctgaagcctttgcttcatctgccactcagtaataatgatgcagcttgggaggtgttctcaatgtattctctgaccctggtacctgtccttccgcaaaagcccagaggtatttcccatccttcagactaaatctccacggctatgaaattaattagaccatagaactcattgtaatggttgccctctgaaaaatgaaatagacgtgttctttattgctagatgtcaaagattgctagagaatctttgagaaaagaagctgatgccactagaggatttaatgacaactgagggtaaaaattgttggataagaaaataatcacattaatatcagaatcacttgttattcccatgtcctgtgtttgagccaggagagttcagtctctagtgtgagtcctggtgtgggtggaacctggggagtccatagggcccttcagtggctaggcaaggctcagagaaggacttcaggcaccagaggcaagagaccttgtggcttaatgtaaatgatcaagtcctttaaaaatctccttttgtgccccctccccactgcccccctttcccggcctcctccccaccccactgtgttgtgctttatgcctgagaatccttacagacaggcggacactgttctcctgcacggggaccttgtgatggggcagggaggggtcttttcagctgctgcccctctggtctccagcagcctccccaggaccgagagtactggtgtctccagccctgtctacctccttcctctgctgcctttgacacaaatagctcactccccccagagacacctgcaaggcacagtgcctttcactccgggctctcacccctccccactggtctccagtcccctggaagtgcatgctcctctgctggccctgtggatgcaggtgtcaccctgccagctgtcctgcacccgctgcttttttgtctcacccttgctatctggatttcctcatcctacctgtggctccggctgcacccatctccgctcaccaccagcctcttatctcaggccggcgtctgccttccagcctccagaattcccaggtctaacggcctcctcaactgcttctcctgagaggctcacgggtcccagtgctaaagccactttttcctccccagcccccacatcggttatggtctcatcagtgccaccactgtcccctcccacctgacacttgggcatcccctcagaatctccctctctcctcatgccatctcccctcctcatgccatctccccgtgcccaggcttgctgtgccccgtgactccccgtccttggcacgtccctgtctgtgcactcccctagccctgctccgatcacttcttgactgctgttctcacagcctcctgtcggccgccccctttcctgctttgctgttctccagtgccctgttctctagtgcctaccctgttctccagtgccctgttctccagtgcccgcctagctgtgagccccttatggactatttctgaaatgcagccctgaaaatgtccttcttctacttggccatcttgtgaccttcagcataaatgaaaactgttagcatggcatatgacccctcataatccagacctacccccctctggcattaccctctgacacctccttcctgtcaacctgtcaacaaacagtgtgccttcaagggtttccccagagatgcttcagtgccacattgctggctcgacactgcccactctgtaccgatgcattctcattctctctcccatcacctctttccctgccatcctcgaggtattgactgacgtgctgtgtgctgtatgccccctgaggtcttctgggtctctccagggctcagcatgtagttgatgcctgccagtgctcattgagcaaacgaatgaggagtgctaacctggcttattaaaaatatgaataaggtggtaagtaatagaaatcctaagtgtgagaaaacaaaatcagtcaagtcttggtggctttttttaaaaagccggacctattgaagggtcttaaactgccaattttcaaacgattagacatggttagtcaccctggaagtatcttcctttcatttttaacatatgaaggaaggagtggaagtaaagaaccaaggaagactgaaagtcagtcttgtgtgtcacatgcattaaaaaagtcttttcgtagattcattcatagaaaaccatatgaccaaattaacccaattcagaaaactattaagccacaatcagaagcaaatgatctgggaaaccttcctaattacatttaaatgtaattgtttccacctcataaatgaaagtcaaacacagggtgttggagtttttaagcaggcctctaataaatcttctgatgatcgttcaggccagattttcattaaaaacagttctcagacctcctcgtttaatgttgtgaattcttctgacttttgggtaggatcaagtagagtaatgcattaatcaaaacagacccatgagatgagtaagataagaattaggtgcccagtttgttgaattactgccttgcctttttgagagagctatcctgattaacagggaactcacgtatttattttgcactctgggaaggaatttagagcaagttaaatagctgcatatggatctcatctcccatatccagtccatcagcgagttgttcacacacctcccaaacctttctcatttctgtgcattctgccgatctcttctctcactcacacccaagtccaagctcccatcttccccactagacccccgacccgtctctacatccaatatggcttcttataatggcagagtggtctttttggaatataaaaatgagcatgtcattcctctgccagaaaccttcaggggtctcccctgcccttgagataaagaccccaaccttactttgtcccacaaggtcctgcgtggcctggctctccctgctcctcctccagactcactgtgaatcacaggccccactgggcttgtccaacacaagccccttcctgcctcaggccctctgctttctcttccatctgttgggagcatactccctcccagtctcagttcaggtgtcccttcatcagggaagccagcccttgacccagaccctatgcatcttccatgcctgccctgtggcatgtaccacagacgactttgcatttgtctgagtatgtttgtgtttagtgcctgtctctcctgctcagcttcctcccgatgatggcagccgcatgcctgccctgtgctcactcactgtcgtgtacttcccacaagcactttgcctggtgcatggtgggtacttgtagttgttgatgtggaaatctaggtgttagcatgatgcccggacaagcctctcacctctttggccctctgcaaaactgttgactctgacccagaagaaagcccattcctccccaatgccaaacagtcaagtcacttccacagtggggcaaagcaagtgcagttgtcatggggtgaaacagacatgcagtcagccttccacggtgtttcaaccttctttttttttaatttcacagttagaaatatcagaccatgaagtttggtagctgttccttcatgtaatgaagctgcagctgttgccattattttgcaatttgttttctttctgattggtaagaatctggggctgctggtttctagggcctaatatgaaagtttccactgaagaaatgtcagtgtttgaactatgatcctgtgccaagcaggaagaataagccgtacccccattcactgctgtgcacacatacctgcccccaccgggaggaggggcccttttagggctgtaacaagtgaaaattctttattgcaagttcagcagagcaacgtctaatttggttatgggtttgtttgtttgtttgttttttgagacagagtctcgctctgtcacccaggctggagtgcagtggcagaatatcggctcactgcaacctctgcctcctactttcaagcaattctcaatgcctcagcctgctgagtagctgagactacaggtgcaagccaccatgcccagctaatttttgtatttttagtggagacaggacttcatcatattgcccaggctggtctcgaactcctggcctcaagtgatctgcccacctcagcctcccgaagtgctgggcttacaggtgtgagccaccgtgcttggcctgatttgattgttttgaagagctgccagaagtttcaagaggctgtgcagtagttggagggagaccatgggcagcagccatataggaaggttctttaggatcgggtcgagccagtctccataggaatgattacccaaagggaacaaggaggacatcatctcagacattgaagtggttagtggccctcccagaagccacagcacattccacaggtgtactgtggatctctctgttaagatttcatggagagaggtgggccactggcagaaagaatctaaaaaggctctttagggggtgataatgaattaaaaggtagagaaacacttgggggaaggcagtgagtgaaaaggcagaaatggtcaatgagggagagggcagagcatgtcctggcggaagccaggagccagacgaagagcccggagctggaggtggctcccaggagcgctgaggccccggccccttcaggccagtcagggacacagaggggtggcacctggggagacgggaagtgggaaggctggcatggacttgctgcctccctgctgtcggtagttgcgctgctggagaggctggggaggatgaggaaggcctggttggtggagtgatgggggtgcagggtgctgactgcccccgaggccgtgccctgcaggatttgtgagcacccatcagtgggcgtttgcccagcagtgctccgtttccaagaatggagtctgacaagcagataagccttgctccacccaagtccagcatattccatatgagccaagctgtttctcagcagcttcccaggcagcgcaaagcatttatggagggtcagggagatgtgtgggaatcgggttgttaactggccaaggcagggagtcccccagaagttcctctgatctctgtgaggaagagagccaagtttatgctggggccagtagacttaaagaggaatttttctactgcagtgttctcccacgagctcttgctgagcgcctgctgtggctgggcattgtgttccttgtgtggggtcctccaggagcccaggcacaggagggcgatggcccagaaagccctgggagggcggggtgtgcgtttcgtggctgaaggtggcaagaatccaccccacagagcaggctctgcagactgctcaccagggagcagggcccctgggtgccagcaccagctccatctgcagttcgctgtttctccttggtcactttgctggatttctgcctccgggatgctgtccaccctcatgacgggggccagggcgctgccgcagcacctataggagatgcgcagggcagagagcagcccctgtgtgacgctgccccgatttctcccacttagggttgacactgtcacggtaccacccggtgttcagtgctgaggacatacagtccctcccctcctgtggtggcaacagctgatgttaagaagggacaaatttgggcgaaaggagaacacaggctgtagttagagtgatggtgagacaggaatgaaggcccgcagggaatctgtgtgcctggaggcgagcattagagtcagatagccgcctctccaacccccatggagcctcgtgcccaaccagcaaggactctggggcatcggccagtggcagtaagccagtgtggtgggctggacaatatgcctgcactgcaggagacggtgtcacgatcagcccccgacagccggtctcaaaagtggaatttgaagagtggtcattgcttctcatgaaagtgtcgccgtaactcatgaaagtgtcacctgtaacgaatcctagagggatgcatttctgtaccacggagggctcgagccgagacaccgagatctgggggcgtgacccctaacctagtagcttagggagcagaattacaaacccctcatcctgtgcccatccttgggccctctcctcactcccccacagagaaacccagggtcagaatcaaccatgagacttgacggctgcccacaggatgatttactgctgtgacctcatttagcatgggttagtgtgggcccattttttcttttctttcaaaaattatttatttatctaattataaaatattaacctccataataaaaataaagccagtataataaaaatatgtaaaataaataaatgtcacttattcccagtatctcaagaaaactcaggattaaaatttttatttacattttccagaattattctctgtaagcacaaaacagatttttttttttacagaagtggaattgtactctgcatactgttttcttttttattttatttatttatttatttatttatttatttatttattttgagatggagtctcgctctgttgcccaggctggagtgcaatggcatgatctcggctcagtgcaacctcagccccctgggttcaagcgattctcctgcccaagcctcctgagtagctgggattacaggcgtgagccaccactcccagctaatttttgtatttttagtagagatgggttttaccatgttggccaggctggtctcgaactcctgacctcgtgatctgcccacctcggcctcccaaattttttttattatactttaagttctgggatacatgtgcagaatgtgcaggtttgttacataggtatacacatgccatcgtggtttgctgcacccatcaacccatcatctacattaggtatttttcttaatgctatccctcccctagccctccaccccatgacaggccccggtgtgtgatgttcccctccctgtgtccatgagttctcatcgtttaactcccacttatgagtgaagctggaaaccatcattttcagcaaactaacacagaaacagaaaacagttttcaaattaatatatcacacataccttttcatgtcactgaatatcagtctataacattctaatgactgtgctgaattttactttgtagacgtgccatatatttttaaccatgccctgttggtagacgtttaggctattttagtattttctatataaacatataattctgtataaccctggaatactcacatatatacataatatatatagcatacaaatgtataatctggaatatacattttgtgtacttgactaatttttttccattgctataaactccaaaagagaaattactgtgagaagggatatataattttaaaattgtgatgcctattgccaaattataatatcttcagaaaaagattgaaccaattagactcccacccacagtgaaggggagaaccagttctctgcactcagcaacactggcttattttctctctcatccctgggcgctgcttttggaggaagcagagtgttttcctccttagccctcccctccccactttgtctgtggccgacccgctcattcagtagctctctggaaattacaactttcaggcaacaccaaagaaggctctgtgatcaaagagagagggctggatgaatgctggaaggagtgtattacagggattgtggatgcttatctacttgacctccttccccttccctgtgcgaggggaaagggtgggaggaaagattcggcttgagtgtagccgagctgtaccgaaagccttctcgataccaatgcctgggctgggatttattaacttgtcattgacgtggatctgataagaaaactcttaccgaaggaacaacaaggcagtctggggaggaataaatggggaaaagaagaaaagccaacctgggtttattaacacatagaacaaaaggtatggatgagcactgtccacgcacctctgagaaccagccacgaactggcagagtttcactgtagaaacatccccaccccacccccaagtggaagctgtttggcatcctccatccccaacacggcctgtacggggcaggagcagatgacccctgggagaaaatgggatgcactgggaagatggcagctagaaagggaaatggagaaatgaaggatgtcagcaaaaccggaaacgcagcaaagggattaaaattcacattgggcacagtgaagagttcagttgactttgcagaaatggaaagcatagtggaaaaatgagattccttcctgaataaagagaaaaagagaatgtcgagggaccggatggatgatgaatgtgttttacgttgaaaagccatctcagtgtgaatgggaacaagagccagtgcgtggagaagccgcatgagagacccaggtgtgagtgctcgggtcagaggggctcaggatctcctgggtgcaggtggcaggaccaaggaacccctggaggtggcctctgccagggcatagagttcatcacaacatggaacctccatccctcctgggtaccaccctaacacttactttggaaaaccctctcccctggcttggtttactctataatgcaaccagcaggcagaggaaaaaagatttagagggaaccccaccaaaatagtggcatggctttctttcagtaggagaggtgtaggtgctatatttttccaccttttttccccaaaatttctacaatgagaaaaaaacattttattttaaaatagtaggcctctctcccttccctcacgctggttactgtgctatgtggccttatggtaagctaggtctgggtcagggcataggagaaagggctgccctgattgcagctgcttttttcatgatcatgggtggtgctaagggaggaagcttcagggcagatgagtgaggagaaggcgtccaatgcaaataaatgccttcaaaaaccagataaatctgtctcttcagcctggatccttaagcttctttcttgtctttaagtttctgtttgcatttttgaaagaaataccatgcatcctttttttatgactagaaaatataattttcagaaacagaatgcattagaatttggatttctggagtcttgatgggtgtaccctgttcttttctctgttaaacataattagtttcctgataaatgaatagcagaggaaaaaatgttgctcttcattattgctaatatatgaagaataattaaaagtcataaataaccataaaacaatttgcctttaatgatagcatctttaactgtgtaacatcctagcaaaaaagcctcattggacattctcttgtgcacagagcccatttgccgggaaatatttctgaatacatgttgtcttccctttatagtaagacattgtcactcaataataatatgcaagataacttcgtgatagtaattgttgttttgtctttgtaattacagacatatcaagtggatttgaagcccaatgggtcagaaataatggtcacaaatgaaaacaaaagggaatatatcgagtatgtatacacatatttactgccttttctttgaataattgaaatgcatgtttggtcactgtcccttgctgaaacagctcatgcatttattatgggcatgagtttattggtcagttttcaacaaggtaagttcttttctggcttgggctaatgggaagttgaatatgggatggaaagtctgtcttgtatcatgactccattgagctgccctataaaggagcagaggagggagaaaaggtctatattattgagtaatacggcaaatactcttttggaatatgtggatatcaactaagatttagaattgcaacggagaaccacggtgtcagtgaccagcagggcaaaattaggaaccaacaaagaaaaaatattttgtctctctcccaacttcttttccataatagaaatgtatagaaatagttaaaatggataggaagaattcagcatgtgcaaccctaaggaattctttctggtatttgtaatattcttaactcaacttcagcctcagtggaacaaaatgttgagtctttttggaagtctagctgttaagtgattctaagacatttgtaccaggcagaagtttttctctgttgggcacgttacgttttcttttttagtgtatatgtgtgcttcaaatgcataactctgggatcttccaaggagatcccctggtgcaggggtgaggtgagcactgcagtgtgtggttcctggcacctggtttctgctctcttgtgggtcgccacagtggccctgagttcctcgtttgcattcagtgcttcgtttcaacaggctaggctccctcctttcttctcatttggaattggtcagaggtcttgaaatcagacagctcttgcattgactgtgggtcttagcacctttcagtgtgatctgcaaagaaaaacctactgtccttcctaattaggaagaaacggagcgtgttagagtctctactcagagatcctggcaaggagtggaactattacatggcggactcttttcactctcaagttgaaagcttgttatgctgaatacatagactagaaataaggtacctcggttcttacctggccacattaattggcactctcgttctgaatatgaacaatcttagctgatgacatcctggcagacaccattgtcttccttcagaaagtacagactgtgagtggggtttaaaaaatattctagctcagggtgacccaggtctcaagtctgaggactctgacatgcgtggtatgtgtcttgcatcattctttgcagttaattcttttagggttcaaacgtggtgggagtcagggccaggcagggttccagctagctttacttttaaaagtataattgaaatcaccaactgctccctgatacctctgctcccctggtgccagaagaatgctgttgagctgttcattgtagcccaggaggtgccacctgagaggccgcacagtggttgtgctgcaggctggtcctcagggccattaccatggttacagtgtaccaccccgaaggtgagaacccttcagaatgatggaatgcctgagatgacatccagagtacatttgccttgcgatcagttttgctgtgcattaaacactgtcgcagggaacttggttttggtgaacttcagttgcataaggaggtcttaccattcatcctctaaattttggcattaaattatgagtgcaaatcattttgctgataaagcttatatgttattgttgaatattagcacattggatactagaatgaaatattagataactaaatgcattgtcctgagtacactttacaaatatgtatacatatatgtgggtgtgtatacgggtgtgtgcatcttatacatgtatacctgtgtgttcataccccatgaacttttcccttttctccatgttgtcacattttaaagcagttaaagcatttaaagcattttaaagcagttaagcatttaaagcagtttaggtcagccaaaccttgatgtgggggaagttaattactcttttgaaatctccagtgagattttaggtttttcacgggtgttccagggagtcttgaaagaagccatgaataaactaaacagtgggggcacagaggagaccctcccctctgctctgctgtcgtggatggaggagaagcactccctgttgcggagaaagcagtgagcactagtgatgatggaggtggttcaatattgtcctcttttctcctgcagcttagtcatccagtggagatttgtgaacagggtccagaagcagatgaacgccttcttggaggtaagccatgctggccagggttctctgccatgtgcctctggtcccgggtcgatgggggatcgcgcttctcctttagctagtgtggtggagctgatcagagacagaggcgaggctggggaccctgcaggaagaccgggatcgcacagctcacaccgctggccagtctccagcacaagagtgttcagccaccgtgccgccacctccttttccttttcacgggttctcctgcttgacttctcttatttttacatttgtcctgtttttaaagaggacgttttacagacttgatctagaaccattgtcttggagtttcaggcggtacccaagagaaggctgccttttgctgcagtgacaggttccaagaagcccgagggctcagagctgaatgatgaagcgcagtccccaaagtgcctggccacccctccctccctggatcactgctgcctgggcttgattgattgattgattgattgattgattgattttgagagagattctcactgtcacccaggctggagtacagtggtgcgatctcggctcactgcagcctctgcctcccgggttcaagcaattctcctgcctcagcctcccaagtagctgggactacaggcacgcgccaccacacccagctaatttttgtatttttagtagagacggggtttcaccatgttggccaggatggtcttgatctcctgacctcatgatccacccgccccggcctcccaaagtgctgggattacaggcatgagccgccgcgcccagccatggacatttttttttaatcccctgccctttttctttgtggcataattcattgcaggttctcttctatacagatacatggaaaacacattttcttaagctgagtttttatttattttatacccagccacctcatgacagcttttaccctgttacagagcaaagtgggcactgcccagatcgaacttttaatatcagggatgctcccaggcccctagcagtgggtgagggattcatcattttaaacagtattccacttggaccaaaagcaaaattctttcttaaatatgatatagtattagttacctcaaagatcacacaggaaacagcctcgtgtccacgtgactgattttctctgcactgaggcagagctctcgtggggtgatgctttcccttcactcaggtacctacacaggatgcgtgaaagcccgggcagcacactcagaaacagctcggggccttagggacttaaaatgggaggacagaatggcaggtttcactctttatttagataagaaatcccaggaagcagattcctgggccccaccgcaggcggtccacaccttcagaaacgcggcgttcgcagcgcgcagggcccagcagagctgagctcatcctagatcacgccacagttagtggtacctgggaactggagcatggttttctgtacgcacagtgtctgcacccatcacctgcctccctctgtgtttcttctccctgcctccagcacgttatttttaagcgtgtctcttacacatctgtagcctgtgcatcttaggacgcactgactcacagcagtgttataaatggcttttggaatccaccctgcctacagtatcccatattttcatcaggtttcagaaattactccactacttgaatcttctagattctatgctttttcgaaactgttatattgtgactgtgctgtttttactggaactatagttacttgatactgtcactgacataggaatcatcaggagagattatatttttttctggctaaccagaaaagtttgtttttcctgtgaaattttttttttttgaaggcaataggtgtttaagatgttttttttttttctttcagggattcacagaactacttcctattgatttgattaaaatttttgatgaaaatgagctggaggtttgtattataaacattattttatgtaaagtggattttttaaagtatctctcattactttacaagtaatattttaatattcttggatccataatgtcctagagagtaactttagatgaattatattacatgtctcttatagggcttatttgccaatgtggttctattacatgtctcttatggggcttgtttgccaatgtaggagtaaggaacagcaaaaataatcagctgtagttgccttgtccatcagagggcagttctggaacatgcctagtaagtagaggccactgagcagagctgggatcatggccctatgcaccaggcgaggcaaattgccacaacaagtagaaacaaggtttgcagtagccctctggacagcagaaacctgcttacactaccagactggccaagtatcctctgctgcatccccatccacccccaccgtggcagccaaatgggggtcttggccacaaggtggccgtaagcatctacttgggcctgtagaacgacgtctcattgaacttgaagtggtttatgttgagtgaggaaaaatgtcagaaggcaacagggttgtagcaaaaggtagtttagtgattgtctagttcagcttcttggtgttgacatagttgagtaacagccattttaaaaacaaaggaatatctcgccctttgttgtgtcgagagaaacaggggaaagactgtctgttgagaagccgttggtgggactcggccatttgccccgtccatagccagtgagtgtttcccatacactggccttctatacttttatctcaaaacagaaagttcaagatcgatgatgtctatagaaatcatatacctcaagcctttcctctgataggtgggaaactgaggcagagagcagctgggtttacccagcaaggttttggcacggtcaggcctaggaactttatttccaggcttctggcttagttctgtttccatttcattctggtacctttgcataaatatcttccatttgtccacaggaaacctcccctgatggagagttgcataataggaacggcaaaccttagactaaatgctaagtcgaagacccagttgtgccttagcgtatgtctgccattcttaggcctctgggcagatgaggtgatttgtcatcactggaattgatcaacctggaggagagtcataagcactaattcttttgtgggtagggagatgcttttagatattcagaggaataacctctcaggaggagaagcagccagggtaatgcacagatgctgctggagcgtgagagaatccacaggtcccatgcgtaagactagaggggtagggaggacgactgtggcatttttatatccgatacgacatgccgtggcttgcgcaaggttcgaattgagctgccctcgtgactgctgcctctgtgatctgctatggcaggtggagcctggaacaggtgtctgccttcctctgttgttatgatttgctagcttaccttcgcggcacagtgaccacatgctggcactgagggtggtcatttctcagtgtgtgatctcgcacctttcacatcctgcttttacatctggtaaattttcttcctagttgctcatgtgcggcctcggtgatgtggatgtgaatgactggagacagcattctatttacaagaacggctactgcccaaaccaccccgtcattcagtggttctggaaggtaactccggggcccagccccagccggtgtcctccacctgaggcaggattgagggctgtgtggcgccctccattgtggtctgacttcaggactgatgctggctttggggtctgttagagcttggactgctgggggagggaagaggcaaactgagccagcagccccgtggtggctcctctgtaactgtagcagacagctagacttgaatgaagttggtccctacaaaagcacactggccttccttgaccacctcgtgaaagtgacttttatttgagggactggtcctccaatgcgtaaatagaaatggggggcttctcagggcagaaacaggcttcagggatggctttgcaagatgccactttctgttaagaagtcgttttctcaatttttaaaatatattccaacaaatattttgatctgtgtatctttcaaccaaagataacacaacatttgatttattatcttagggccactgtttgtatcctgttcagcttaggagggaagtaaaataggaatgggttagtccaaaggagatatagtaaacaaacttaaaaaaaaaaaaacagttatcccccaaaaaggctgattatttacttcaccccaaaaaggaatcatttaactttttcaaatttatttttatttatttatttatttattttaaagatggggtctcactgtgttgcccaggctggattcaaattcttgggcttaagcaatcctcctacctcggcccctcaaagtgctgggattacaggcatgagccaccatgcccggcctttttcacatttctaaatgccttttattactatttcaaatgccagcaggaatacagagataaaaaagcaaaatcttcaaagcctagtccaggtctcacttggcttgttttagatgtttgcctacagcagtccaagtggcattaccagtaaagccacctggattcccataataatgcagatatgtaagatacacagattattttagaaccccatctttgcctttgttgttttgtttttgttttgttttgttttgtttcattttataaaatgatgtcttctagggaacgtgtctacaatctgaaatcccatctcataacctggcttccccttgtgatgacaaatcttaaatactgtatatttataattggcttagggggaactggtaagcctcgaacacagaaacatgagcttggtgccatcagagagtttgctttttatatcatttattttggcctattggcagaagaagaaagagacggacattgtgatcactcagtctcttagattagagaggccagctagtattgtggccataaaaaacctactcagttttcagagtcaactgtctaggtcttacattgcaatataaataagattaagttctgcctgcctgcatgacagcagcatgtgccatgggtcacgtggggggtataatgaccttctgcctctgttcataggctgtgctactcatggacgccgaaaagcgtatccggttactgcagtttgtcacagggacatcgcgagtacctatgaatggatttgccgaactttatggtgagcaggataccattggattcagttgtcctcctgggaatttccagccaggcatgaactctggcccaagaaccctgccgccaggcctctgcagaaggctaagtttcaggacagtgtgccatgcataggttccatgaaagttcaatgaaagtactgttatctatactttatatagataacatggtgcttctacttcgagggattggggggcagtttgtgaagaggtccataaggctgctcttttttttttttcctagtttagttttttagtaaatcgttaaaaactaggttttgtagggtcatttatatggtcgtaaactgaggtataaagtcacctccagtaggcagaatttttcagtgtttaccatagatttaaaaatcactctgtactttgcatactgaaagtcacatttcattcaccctcccacccacaaaactagtttgaagtttaaatttccagggcccagctgagaggctgtagctgcctgcctttccacgtaactgttgtgtttgttaatcttggtgcagttccattctggagactaagcagagtctttctgtgaggttgtgcagacctctggcttccctcaacattaaatatcaatgttgcagcagaagagagtgtcttgggcctcacccctgggggcaaaccctgccctgacagtagctggactgcagaccacaccatagcttcattcttctgccccaagcaatcttaacatttctttttcttttcttgtctaggttccaatggtcctcagctgtttacaatagagcaatggggcagtcctgagaaactgcccagagctcacacatggtgagtgacaaaaacacatgcatgtcaatgcaatatctgaactgcttagctgggtatggtgctgggctcaaggctattgaatgctctgtttcctgtctgtaagtagcttagagaattaaaggacagtgatgtggatgaaaatagaaattgtacagtagtgctaataagacataatgcactcagtatgtttggcacataaagggctcaggcctccctgctgtggggaatttctcctctgagcccagtccttccctcattattctaggtagtggagctttcactgttcagcatacatagataaggcagctctcaacctgtataataaacacgttgggtttttactccaaccttaaattggttgagaagttaggacaaaataccctgtagaaacatcctttttcaaaggccttctatgcccatgaataacctgtaattccctggaattgagcagtaacatgactgtggtcggaggagggtaagagggctgacacgtggccagggatgcccaagcgtggagcgtggctgccctcagaaggccctctcaggaggcacagtgacgcagaagggtcccagttgttttctgaacagttgcatgaaacccagcacaaatgcagactggatgggatcagtttcttgaagccgggttcagggagctcttgctaactcaaactcccatgtccctcgtgttggtttttctgcaaaggcctttatttcttgctcctgaggaagcagcagaagtgggccttctggaaaacggtgagcagcgtagccctgtgtttctcatgcagcgggggctgcaaagcctgctctggccatagtgagctaacataagcaaccaaacactccctgcaggaaacgccctcccttacactagaagtgctggccaggagagaattctcatgaacatgtgtttgcgaaaaattggctgtgaaaggtttttcacttctgtcggattcccttgcctcaccagaaaggtgttttttttttctattcgtaccattcacgtgactctccagatggaaacaatgtggtcattgcctgtcagagccttgaaagcaagctgactccagcctaaaattcatgaatattcagagcagtcattgtccgtggttctctggctttattctaagggaagaatgtttgagtagttcagagcttttatccaaatggtgtccaagtcatatgtggttttctgggttctactggcctccatatgaaggcaccagcgttgagccaagccccaggactgtgggtggtgatgcgaaactcaagctcataatactaaccaggatgaagattaggaaaagcgaaattattgggcacagtcatcatctgtggtcaggcactgcttaatctttatggcagccttatgagatatgttattcccttgggctgtcagaaggctggcccagggctcaccagagtcacagattcccagatcacaggatttgaactcagagctaccagaattagagcctgcaccctttaccactacaccagatacactgcctctgttgatatacccactttctttttagacttttccaaggaaaccaaattagtgaaccaatttcatgttcattcagcccatgtttctctgtgacttcagggacacatatcttactattgaactgtcttttttatttcggagcccacatgattctgccacaagtagaacttcccagataagacctctgaactcagtggttctcaacctcagctgcatgttggaaccatctagagagccttaaagaaatcactgatgcctggaatttggacttcattggtctggtgtgtgacccaggcagtgggattttcaaagctccccagatgatttttataggctggcagggttgaaaattcacagctcttccctaggaagggcaaagatccacctacaggaagggaacaacccagctggctcttaccagaacttattttcctctttatgtgtcacggaaataaagcaactgtgtagttttcctaatgatgttctccccagactaacttgacccggatggagaggactggcagttgcaagcaacactggctagcatgagtgggactgttctgctgtttcttctaaatggctttcctccctacctgaccctgactgtattttgacataggaaacagaaacttcactggctgtttcgtggcaacagttctgccataaaattttgccatacataggtttaatttcttccacgttttatgatacacaattaaagttcagaataaaaatctgatttcctagaagagcagaagctgaaggatctggttctctgtgatgagggtacctttcattaagctttccaatggtgattattgagtgtctgacattcaaaggacttcatttcattgttctataaaaggtcactactcagacatttaaaattactcttcattaagaatcacaggcccacctgcccttttaggtagactctaaagcaaacaaaaatcatctcgttcagcccatgcatcttccacgtgaggacgctgaagccctgtgaggacaatgagctccttaaagtcacccagctcattagtgcagagcaaagccaggtccgtgtgtcctgacctctgaaatgataggaactcacactcaccaagcactctgttcattccggggatggtgctcagcacttgatgcgattgactcataccatcatcacagtggccctaagaggtgggtgatgttatgacccacttttttacagataacactgggatgcaaagcggtgaagcattaagcagcatgattcagaacctcagatcttgacatcccgtctttgcctctctcttcatcatgccagtgtttctcaaacctgaataatctgtgcaccttttttaaagggaaaaaatggtcacagattctcaagaatgggcctgagacccccatagggattgcaggcccgggactgtgaaaccccagctgaaaagcctgaagccactttcggtgaaaggctcttttaaatgccatctgtagatgtgaagtcctgtctttattaatatgataatagaaagttaaaagcctgtattagtacttgctcttttaggattcctgggttcctgagaaccccagtttgagaagcacagtgttattctctgtcttttagtgtttagtggctgttagagaatccaagtggaactcagtgggacttattcaatatttagtggttgttaaacggccctctacggtatgtgtttcttttctgttgctgtgacaacggttagcttttagtatatgtgcaagtgctgccaaagcgagcacgtgaatggttagcttttaaaacccaagaagttactttgctcattcttggaatcacacatcaatacctggagggggcggttttaaacacagtttgagcactcgcggcagaggcagcacaagtgcacttcaagagctgggctttggagcaccccagggctgtacctggccccgtgtgaccttgggcaagttacctaaccttgctgtgtctcaagctcctcctctgtgaaataggggtgaagcattagctgccttacaaagtgattgccagggttcataacattgagacaaggctgatggggcatggtgagcactccatgaacatgagctcttacgtcataatgagctgtggcaagtgtgcatgccattttcatgacagatacacatcagcaatcaccccccaacacatacacacacacacagaggtgcaggttctgtggctaaaggctctggtcttgagccccatgtagacatacagtaaatgttgaaaggtgttaacactgataccatctcttgagtaattgagcccttgctgtatgccgggcccactgatccgatccacttggcactcatatgtgcagtttccccatgtcacagaagcacagaggccatccatttgtctgaaaaccctcactattgccagggcgatttgcagcccccgcccccacctgaagcctccagatatgtagggactttttctaaatgcaactttacatagcaaatgtcaattttgcctgactttgatcagaggaggtagcttagcactggtgttcccgagccccggacagcctgggttctgtttgtgggtctgccgtttgacaaagactgtgacctcaggaaccttgccctatgtctctgctccaggagctcctgtgcagaatggagataacatgacctgcttcatagggttgtgatgaaaatgaagtgagttaatagggagaaaagcacttggcttgaggcctagtgtggaataagtaatagtattagagatagacacagtcttaattcgtgggtaactccaaaagcatcagctctgtgttccaagggtttggaaatcttgccggttactcccttcccaccaggattcctccgagatctgcatctgactatagcaaaggtttcatggaccatttgaaaatgttctttctctgtaaattacaagagcttatttagtgtggatgtttcatagctagaggtttttggggtttttttctccaggtaatcaaaattgttggttaaggcttttttattctcttactcaaacctcatgccctattaaccagatcgaggaagtgctgttgtggcttttcacctacactttttgttccttttgcagctttaatcgccttgacttacctccatatgaaacctttgaagatttacgagagaaacttctcatggccgtggaaaatgctcaaggatttgaaggggtggattaagcaccctgtgcctcgggggtggttgttcttcaagcaagttctgcttgcacttttgcatttgcctaacagacttttgcagaggcgatggcagagagcagctgcaggcatggtccctggagccgagccttcaccacgcactcgtccaagttcggatgcgggaacctggtcccagcttgagttcctgcctttcccaccacaaattatcaactggttgatgtgtacactaattacatttcaggaggacttaatgctatttatgttgtgcctctgcaggcaaagcccttaataaatattttacatcctttctaatgacaatgaatggaattaatcactcaacaggtatagtattacgactcatgtttactttttaaaatgatttagaccgattttcagattttatttcgttatgattaaagatgtctcatgtacttggaaaagtgagcattttttttttttttgtatttcactttcataccaggcttaatgtcaatgacatttttatttttgaagtactctgacacctccaccctctactttattagaattggaaggcaaatttttgtccaaaaacctacagacaagtactttgagagaatttccaatataatattagacataatgataattttttccatactcagaatgaaaaactggatattacgtttttgttttggggtttttttgtacaaatttagctaatagctacaggctgagagaattgtaacatagcatgacaaattttgtgttgacttgaaaggaatcacaccattattccttagaagtaattacatgtgttctaacacatttgagacagggttggactcccatttctcatccgagaaattacttaacccttcctggcgctgtacagtcatcttttattctatttcctctttgctgtttgtagtagagacattttgaatgaaacttggcactgcttgattcaaaactgtggaaaccagatctgtttagtctcctgtttgtatgcgtttgctaatggtagctaaataaccagtttttgttgtaaatgcaccaattctgaaggcactttatgtactacatggaggtcatatctggttttgtttttatttttttatcatgaacattaaatgtgatgatgatttcttttccctgcacacatctttccggtgcaatatctatcaattgtgaatctggctgctggtgtataaaaacctggatgtaaagctgagcctacagacctgtcctcaccaactgttttgtgatttctactcaactacaaagatttatttaatgtactcttaatctaactgagttttgttaccaatgacctgttgcatgcttcaataccgtgtactgcctgagttgtgcctcttgtgtgctagattaaaagtgagacagagacttgacttgatcctctgagctcaagctattgagctggtagtggcagaggactgagggtacctgcacagtttgattcttttccacgtgtaagtctccattgcagaattgtcgtgctttgagaaaacacctgaggcagtgtgggagttgaacgaccctgctgtcctttttaacctgtgttgtcctagaccctgtcggggcagtcaggggacactagagatttgatctcatgcgagtcatcaataggacaaaaaagttgtggtttggggaggtctgtttgttacataaaaaggacctttcggtgtaagaaattgccgtttttaccctgccctggctggcatgtgagaagccatggaaggttgtggttgtaaatgagttgtctaaaggggtgcagaggcctgaggtttctaaaagaaggtagatttctacagagctgagtgttggttcctttttcttattggttgaaaattacctggtagtgatcagaaaacttagatgctatgtaactaaaaaaaaaaaaaaaaaaaaaaaaaaaaaaaaaaaaattcccgctcatgagttttgactattggtgagatgttttccgctacagttaacatgacaaatgtctcagtggcaaaaatcccctttttgtaagcccccatagtctagaggcagttttctttttaagaatcatgccagagcctgagtcgagcagtatgctttcttggtttttgagagtaattgtgtaattgtagagggagaaatccaattctaacctaagaactgggattcttctgtcatcttgtaaaccgtatattgaaaaaaacagaatgtcactaaatgcatattaagtcaagtattggaaagtataaaagaaaaatcattctgacaatttctaagccagaagcaaacaagaattactgaaatctaccccatgaatacttggaaggcagtaattgtgagtgacacctcagttcatcaaccccttaataatatcagcttaattttaatgacaactaaatatgctgaagtgaggatttagtattttttaaaaaagcaaaacaaggttcagtagtcctcagcaattctccaagtttctctctttgcctaaaatggtcatagatcttgatttctctgaatcgtgatgaccacacccagtcatcttcacagcataattgcaggtggcagtaaagagagtgtgctgggtaaggagcagttgctgggtcattccttgggccccgacctgcccggggagtagccctgggggagagagggcagtgttgcctatcccagaggtcccagcagtcacactgctctgcaggccgggctctctttatagccagagaaatcaccttaatgcagtctctttagttgtctgctgaagctgtagttattatgggccacttacatgaggctgagaagtacgtgccggagctcacacactgcctgttgcggttctcttaacatcagttatcacagctgcctgtgggtcccgggtatttccattcctgccccttgttggcccgaggaaggatgtggaaagagcacctggtgggatgaaggtccaacagcctgtgcctctccactgctggccctggagccggcagcagtgaggcattcattgtctgtgttgcggtgtattcccagcttcagtgctcttttcctttttgcctgaaatgtttatgcttctctgcagccagtcctctaacaaatctcaagaacaaaggtaagacacttggtttttgtttccaggacccttcagaaggtgacatcagatattccctaaattcagacaatgagggatacagagcgacttggcatgtattatttctcccatgtaaggacaaagggacagattattattgttatttctgagacagagtcttgctctgtagctcaggctggagtgcagtggctcaatctcagctcaccacaacctctgcctcctggcttcaagcgattcttctgcctcagcctccccgaatagttgggattacaggcacccaccaccacgcctggctaatttttgtatttttagtagagatggtttcaccatgctggccaggctggtcttgaactcctgacctcaggtgatcctcccgcctcagccttccaaagtgctgggattacaagcatgagccaccgcacccggcctcacagtgacagattctgagaaacagcatgcaaaacatttgaaccattttctacatctcccattgttgcatagagagtgtgcaccgctgctatcttgccagatccacactggtcctcccgaaagccaggttcatacacagcaactttttaattattctaacagttacccattaacagtcgactcctgtatttctgagagtcttgtactcacctctgaaatttaaaaacgtataaagagagcctgggttaatcagttctgcagcccctacgtgacactgtgctagttctccttcttctgtctcctccttaccctggccctgcacccctgtacttaagagggagaggtgggaggtgctgtctggtatcatttgctgcctcgccagtagagggtgccgctgtgcagggtaactgcccgcctgctcccttcctgacctcccctgaccccgaagatcactacctctgtcattcaggcattggggtacatcctgataagtcgtgtcagaactgccaatttcaggactgagatgtgtttttaaaaaacaaatccttataaactccactttgtactttagattttaaaactggggaaaaatgtgatattctttggaccacttttttaatttatataagccttaatgaacagtgtctatacatttgcatacacacacccccaccccagagtgttctcagtatgtcagagaaagtgccacagcattaggacgggagcttggagaacgttttctagaaaagggttagcttcctgttggcatgaaattttccaagcaaacctcattaaacatctgttgtttgttaaagatgttccactgaaagcaacgcatgtttcaaaggcacgtctttccgttcgttggttttctgtgtgtaaggagtagcattgctgttggcgcctaacctcgcgtgcactgcattctcaaccccgtaccagtgcatcatcagaagccttcctcgtgaccataactctgtgtctgcagatatgtgttcccgtgtaagccagttttccccttttactcagactgatttcacctagattgtcacggtttccttcatgttaactttgcgtgactttgttcttcctttactactctgtatgtaatatatatacatatatacgtacatatgctgtccaaatatatttgtatatatttgtatagcatttttacacctttattgagtaatctggtttcgaaaggaggtgagagtttagtcccttctgcagttttctccaagctgtgtcctgtgaatttcaacccttggagcctaagaaaaccctaggaagatgatgttaatttgctgtcatttcctaattcaggatctatcatcaaatgaaacatgaaaaaaacagtgacttttaaggtgaaaagagtttcaagcattccaaataaattatcaatgtttcataactttttattataaacccacctcctaataggaagccaagtactatttgatacagtggtaaaaaccaaactaccttgaatttttttaaggcaacttatgaataatgctcattttcacagtcagaatagctttaaaatatggttgaatttgatacacacaggaagttttcttgaagaacaatcctttcgcttttcttttttcttgagagatctaaagagaaactgtagattgttttcctgacagcaaaagactaatgtgacaaaatgaagtcattgtaaagaagcgatgcaacttgtcaaatatttaataaagaattatggaagctggaacattttctacatcaagtgttatgggttgtttgatttaaagcttctttgtgaatgcaccatcttaattgttgtcagaggggtttaaatgcctgcagatttatagtatgttcatttccttcatctccctaaaagcgccgcacttttaaaaacattaaagtctggcagggcacagtggctcacgcctgtaatcccagcactttgggaggctgaggtgggcagatcactgaggttaggcattcaagaccagcctgaccaacatggtgaaaccccatctctactaaaaatacaaaaaatatatatatatattagccagacgtggtggcgcatgcctgtaatgccagctactcaggaggctgaggcaggagaatcgcttgaacccgggaggcagaggtttcagtgagctgagattgtgccattgcatgcactccagcctgggtgacagagcgagattccgtttcaaaaaaaaaaaaaaagtctgcccaaaacacatggcttaagcctactaaaaggatgcacatttattcttatccgtctgctgttttgttcttttattaaacttgagaattactgattttacgtaacatttgtataatccatgttagtctgttcctcaaaaggcatccttgtatacctagccctcaacttgtgtgagagttaataagactcaataatgaatccccaagttgcttctcagaaaggtgctgtcagaatcccgaccgtgtgtcactgccctgtgcaaagccggtggcatttttcctcatgccatttcattccgctcagatcatctcagactcctggagaattttccctttttctttagtactgagcttcctcttgatgtgcttaacccatcccctcggggcagaggagatagctagcggggaagcaggacatcatttagtctttggtttcttgcggcttgtctttttccattaacagtagatggcatcttgccagaaagctgtccgcagcacttggaattcctgcctcctcctccagggttatgagtacacatgagaggcacaattggacagagtcactgtgaatatttatatgttctttcttaaaaccacacatggtggaacgaattacatcaatgacacagttgctagattaatacgcttttaacctgctctgaagtccaagactcattaggcacttgtgagatggtgaagcccctggtaaaagtgtttgcggtgagcatgggtatcctgaattctgacactagctttctcggggttggctctcagagccatgttcaaaggggttcctgaggtaagaacgcagaagcctctttctgggagagaacacttctcaaaacagcttccagagagctcaggctgtagaa

SEQ ID NO: 182 - protein, 947 aa, Homo sapiens
MRRLAFEQGESRILRVKVVSGIDLAKKDIFGASDPYVKLSLYVADENRELALVQTKTIKKTLNPKWNEEFYFRVNPSNHRLLFEVFDENRLTRDDFLGQVDVPLSHLPTEDPTMERPYTFKDFLLRPRSHKSRVKGFLRLKMAYMPKNGGQDEENSDQRDDMEHGWEVVDSNDSASQHQEELPPPPLPPGWEEKVDNLGRTYYVNHNNRTTQWHRPSLMDVSSESDNNIRQINQEAAHRRFRSRRHISEDLEPEPSEGGDVPEPWETISEEVNIAGDSLGLALPPPPASPGSRTSPQELSEELSRRLQITPDSNGEQFSSLIQREPSSRLRSCSVTDAVAEQGHLPPPSVAYVHTTPGLPSGWEERKDAKGRTYYVNHNNRTTTWTRPIMQLAEDGASGSATNSNNHLIEPQIRRPRSLSSPTVTLSAPLEGAKDSPVRRAVKDTLSNPQSPQPSPYNSPKPQHKVTQSFLPPGWEMRIAPNGRPFFIDHNTKTTTWEDPRLKFPVHMRSKTSLNPNDLGPLPPGWEERIHLDGRTFYIDHNSKITQWEDPRLQNPAITGPAVPYSREFKQKYDYFRKKLKKPADIPNRFEMKLHRNNIFEESYRRIMSVKRPDVLKARLWIEFESEKGLDYGGVAREWFFLLSKEMFNPYYGLFEYSATDNYTLQINPNSGLCNEDHLSYFTFIGRVAGLAVFHGKLLDGFFIRPFYKMMLGKQITLNDMESVDSEYYNSLKWILENDPTELDLMFCIDEENFGQTYQVDLKPNGSEIMVTNENKREYIDLVIQWRFVNRVQKQMNAFLEGFTELLPIDLIKIFDENELELLMCGLGDVDVNDWRQHSIYKNGYCPNHPVIQWFWKAVLLMDAEKRIRLLQFVTGTSRVPMNGFAELYGSNGPQLFTIEQWGSPEKLPRAHTCFNRLDLPPYETFEDLREKLLMAVENAQGFEGVD

(The sequence listing continues in the following parts.)
